United States Patent Application Publication US 2026/0218238 A1 - sequence listing, part 3

SEQ ID NO: 14632 - DNA, 10218 bp, unidentified
  misc_feature 1..10218: note = Synthetic
  source 1..10218: mol_type = other DNA
atggcaacaagaggagcaagcaagtctcgggtcacgacccggggcgtcaatatggtgacggccaaggccaagagtctggccgtcaaaataaaaaacaaaacaaaacaaaacacaagaggactgcgggggttcctcttgtttttagtggctcaaattttttgggcacggaaattgaccccgcaagtcaaaaaactgtggaggatggtggacaaggtgcaagggctcaagattctgaagaaactgcgaaacatagtgacaaacttgatgaagggattgtccggacgcaggaaaagaagaagcccaccagcctcaatcattttgctactgctccccctaatggcatactcagctagtgtgacacgtcagcatggagctggattgttattgaatgtgacctttgctgatgtcggaaagacctttgaggtacaagggggtaactgttcagtcaataccttggaagccggaaaatggtgtgatgactatgtggaatacgcttgtgtcactctgactgagggtgaggaacctgatgacctagactgttggtgctatggggtggacaatgtgagagtgacatatgggagatgtaaaggcggtgggtcccgcaggtctcggcgctcagctttgataacgcctcatgtcgacaaaggactcacaacaagacaagagaaatggcttccttccaagattggagaacagcagctgcagaaggtggaaaaatggatcattcgtaacccattatatgccctgggggcgatagctctggcatatttcattggaacatcagtagtccagaaagtagtcatcgccatactgctgctaggaattggaccagcttattccacacattgccttggtatccccaaaagagacttcatacggggacttgatggaaacacatgggtctcagttgtgttggagcaaggaggctgtgtgaccctgattgcagacaacaaaccatcagttgacgtgtggctcagttcaattgtggtcgacacgccaacacttgtccggaaaatctgctatgaaagttcagtcacaggttcaaaagctgaaggagcttgtcctactatgggtgatgcgcacttgactgaggaaggaaatgaagaatgggaatgcaaaagatccttctctgacagaggttggggcaacggctgtggtctttttggtaaaggcagcatagttgcttgcgcaaagttctcatgcaccaaagagatggaagtgtaccaaattgactctacaaaaatagaatacactatcagtgctcaagttcattctggagccaaaaaagaggattgggttaaccacaccaaactcatcaagtttgttcccacaacaggaacatccacagtgacttttacaggttatggtaactttggccttgaatgtcatgttcaaatgatggtagatcttggtaactcttacctagtcaaagtgggtacagacgcatggctagttaacaagcagtgggctcatgatatcacattgccttggcagagtgggactggaggacactggagagacaagcatttcatggtagactttgagcaaccacatgctgtgaccatgaaagctttagtgctcggaagccaagaaggtgcattgaggactgcattgtctggggccatggttgtggaagttagctcaaacagatacactctcaaaggtggccatgtcacatgtaaagcttacatgaatgacctaacgctgaaaggatctacatatccaatgtgcaagaagggaatgtcttttgtcaaacaaccagtggagacagaccatgggacagctgtgatgcaggtgaaggtgacaaatggagctccatgcaggattccagtcatagcatcagattcgatggctggcactgaaaatcgtggcagcgtcatcacaactaatccaatagctgcattgaacaatgatgaagtgctggttgagatcagtcccccttttggggaaagctacatcatagttggttcaggggatgacaaactgacctaccactggcaaagatcgggcagcacaattggtaatctcttcacagaaaccatgaaaggagcccaaagaatgataataactggtgaacactcatgggactttggctctactgggggattttttgcctctgtcggaaaagcaatacacacagtttttgggactgcattccatgccatgttcggagggttgagctggatgaccaagattttgatcggtggcctcatggtttggctgggactgaactcaaggagtagctcactttccatggccttcatatgccttggggcactccttctggttctagcaactggagtaggagctgaagtgggttgttcactcaattggaaacagcgtgaggtgaaatgtggagatggaatgtttgtcttcaaagacacagatgattggttcacgaaataccagtatattccagaagatcccaagacaatggccgggttaattgcccaggcccacgaggaaggactatgtggactcaactcagttggagacttggaacatcgaatgtgggtgtcccgtgtggatgaaatcaatgccattttggaagaaaatgacattgacctgacagttgttgtccaggactcagcttcaatataccagcgtggatcacatgcgtttccacgtcctaagggagagctcaagtatggatggaagacatggggaaaaaacatcatttttagtccatccagaaagaacggcacctttataattgacggaaagagcaaatcagaatgtcctttcaataagagggtctggaactcaatcaaagtggaagaatttggcacaggaatctatcaaacaagagtgtttatgcgccctgactatgattactccaagttgtgtgacaccggaatgctaggggctgccgcaaagggagatgcctctgtgcacggagaccctctgttctggatggaatctcaaaacgtcaatgacacctggacaataacatctctggaagccttgaattatcgtgagtgtgagtggcctagttcacacacattggatggttcgagagtgatagaatctgacatgttcatgccacgcagtctagccgggcccgttagccgccacaatcacatacccggatacaaagtgcagtctagtggtccatggcacaacactccattggaagtaaaaagagaagaatgccctggaactcacgtcactgtggaagaaacatgtgatgatagggggaagtcagtccgctcaacgacggatagtgggaaaatcattccagagtggtgctgccggagctgcaccatgccccctgttagtttctggggaccagatgggtgctggtactcaatggaagtaagaccaaaacacaccaatgagggtcacttggtgaaatcttgggttgtggcctccaagggcgatgttgatcctttctctttgggactcctcatgctttttctttgtagtgacatgttcctgatgaagaggttttcgatgcgtgctctcattgctgggagcatcatcatgctgggagccatgacattaggaagcttgacatatcttgacctcttacgctatgtggtcacggttgggatgtacatggctgaagccaatagtggaggagatgtgacacacctggctctcatagcggtttttcgggtgcgggctggctttgttagcgtgctggccctaaaacaaatgtggagccctagagagagatttgtcgcagcttgtggaatagttatggttcagatagcactgggagacatcatgaatactaatctcatggagtggctgaatgcagctggcatgtcaatactcgtcatcaagtcaatagtcgatccgagaaagtgcaatgtggtgctccctttactctgtcttctcacaccacttacgacgacagaaattcaaagggctgtgatgctattctgttctgtggtcatttccgtgaccgtactgcaaaccgacagcgtctcaacaagaaagtctatccctcttatagccttgaccatttgttcattctttaaatggacaagccctttccttggcctggtgtgttacttagcttttacacgcattccccagcgctcatggccattgggagaaacgatggctgccgtgggactggtaggagtattggctggaatgggtttgaaagacatgaatgggatgctaggtccggttgcagtgggaggagtcctgctcatcgtcatgagcttatcagggaaggtggatggcctggtgataaaaaagatatcagatatcggctgggacgaagacgctgagataagtggagcctctcatagatatgatgttgagcagacagaaactggagaattcaaaataagaaatgaagaacccgctccatggacccaggtgatgattttaacaatagccattgtcagtgcagcagttcacccagcatgtctagctgtggttactcttggatggttcttctggcagaagacagccacacgcagcggtgttctctgggatatccctactgtagttccaccagaagaggtaggttaccttgaagatggggtatacaccataaaccagaaaaacgtccttgggatggcacagaagggtgttggagtggttaaagatggagtgttccataccatgtggcatgtgacaaggggagcctttttgctgtttgagggcaaaaggctgacgccagcatgggcgaatgtcaaagaggacctgatctcatatggtggaggctggaaactggaagctaaatgggatggaacagaggaggtacaactaatagcagtggccccagggaagaatcccatgaacatccaaactacgccaagcattttccaactcaccaatggtaaagagataggagctgtaaatttggacttccctagtggaacttctgggtccccaatcgttaataaaaacggtgaagtcatcgggttgtatggaaatggaatcctgatagggaacaacacatacgtttccgccataacccaaagtgaaagctccctggaacaagacaatgaccaactacaagacatacccaacatgctcagaaaaggaatgctgacagtgttggatttccatcccggggctggcaaaacacgcgtctatctgccgcaaatactgaaagagtgcgaacgattgagattgaaaacccttgtgttggcccccacccgggtagtcctcagtgaaatgaaggaagccatgcctaaaatgagcatcaaattccacacccaagcattttcaaacactgctacaggaaaagaaatcattgatgcaatgtgtcatgctacgttaacccatagaatgttggagcctactcgggtgactaactgggaagtagttatcatggatgaagcccactttatggacccagctagcattgccgcaagaggatgggcagcacatagatcaagagcgagggaatgtgccaccatcttcatgtctgctacacctcctggaaccagcaatgaattccctgagtccaatggaaccatagaggacattaggaaagatattccctcagaaccatggacgaaagggcatgaatggattcttgaagacaggagaccaacggcttggtttctgccttctatcagagtggccaactcaattgccaattgtctccgcaaagccgagagaacggttgtggttctcaatagaaagacattcgagaaggaatatccaacaataaaatcaaaaagaccagactttattttagctactgacatagccgagatgggtgctaatctgagagttgaaagggtcattgactgccgaacagcttacaaaccattcttggttgacgatggaacgaaggtcatggtgaaaggacccttgaagatatcagcgtcatcagcggcccagaggagaggcagagtcggtagggatcccaaccgtgatactgacacctatgtttatggcgattcaacaacagaggacaatggacactatgtttgctggacagaaggctctatgttgctagacaacatggagataaagaatggaatgattgccccactctatggcatagagggtaccaagacaaccactgtcccgggtgagaccagattgcgagatgaacaacgtaaagtgttccgtgaactggtaaagagacttgacatgcctgtttggctatcatggcatgttgcaaaagctggacttaaagttcaagatagatcatggtgctttgatggagaggatgacaataccttgttaaatgacaatggcgagccaatatttgcccgcagtccaggaggaggaaagaaaccactgaaaccacgttgggttgacaccagagtatgcagtgacaactcagccctaatagacttcatcaagttcgctgaggggagaagatccatcaatgggttattaattgggctgcaaggctttccaaaatacctgtcaggaagaatgaaagaggctgttgacacgctcacagtactgtacaacagtgaagctggaagtcgtgcttataaacacgccctagccatgatgcctgaagctgttaccatttttctcttaatcatgctgaccattatttgcacctcaggcattgtcatgttctttttggcacccaaagggctcagccgcatgtcgatggcaatgatgaccatgttggtgtctgcttacttgatgtctttgggaggtatgaacccagtgcaggtgtcctgtgtaatgctggtattcttcatattcatggtggtgttgatacctgaaccagggacacagcgatcaacatatgacaaccagctcatctatctgcttgttggagtgatgagtgtcatcctcatggtcacagccaatgagatgggtatgctggaaaaaaccaagagagacatctttggcacaaccgtcgtggaagagggaaagaagtggacctttccagaactagacctccatccgggggcagcttggacggtatacgttggcttagtcacgctagtgactcccatgttgcaccattggattaaagttgattatggcaatatctccctgtcaggcatcacccaaaatgcccaagtgttagggttgatggacaaaggaattccatttatcaaaatgaacatgtctgtcgtcatactcttgctgagtgcttggaatggaataacactgcttcccctgtttgcaggaatgggagctgcagccctgcactggggatttatcctaccaggactgcgtgcccaagctgccaaggccgctcaaaaaagagtgtaccatggagtggcgaagaatcctgtggtcgatggaaatccaactgctgacatcgacgatgctcccggcatgcccgccatgtatgaaaagaagttggccttgataattctcttcattctggccacggtaaacttgatcctcactagaacgcctttctccattgcagagttggtggtgttgggctcggcagccttaggacctttgttggaaggaaatacaaatgcatactggaatgggccgattgctgtagcattcactgggctgatgagaggcaattattatgcgaccattggcttgatgtacaatggatggctagcaaaacagaccaggagaggaagggctgcaggagttactcttggtgaagtgtggaaaaggcagctaaacatgatggggaaacaagagtttgaaaaatacaagatatcagacatcatggaggtggatagatcagtggctcagagatacctgaaggaaggtaggaatgatgttggcatcagtgtttctagggggactgcaaaaatgagatggcttcatgaacggggttatgtgaaattgtcaggaagagtaattgacctggggtgtggacgaggtggctggagctattattcggctgcgcaaaaagaagtcatgagcgtcaaaggttacacgctgggaatcaatggacatgaaaaacccgtgcacatgcaaaccctaggctggaacattatcaaattcaaggataaatctgatgtcttcaccatgccagctgaaccatgtgagacacttctttgtgacataggggaatcatcatcaaattttcttattgaaaaagatagaactctcaaagtcctggaaaattttgaaaggtggaaacacgtcaatactgagaacttctgtgttaaagtcttgtgcccttaccatccggacgtgattgaaaaattagaaaggatgcaactcagatttggaggaggattggtgaggatcccattttcacgtaactcgacccatgaaatgtattacatatctggggctaggaacaacatcactcatatggttaacaccacctccagaagtctattgagaagaatgttcaggcctacgggcaaagctttagtggagagtgatgtcttccttcccacaggcaccaggagtgtcgcgagtgaagccggacctgttgatcatgatgcgttacaattgagggttgaccagataaagcatgaatacagcaaaacctggaccattgatttgaaccacccatatcggacttggcattacttgggtagctacttgtgtaaagccactggcagttcttcatccatgctgaatggcattgttaaaatgctatccatgccttgggacaagtttgaatccgtgacattactggctatgactgatacaaccccctttggacaacagcgcgtcttcaaagagaaggttgacacaagagccccttctccaccacctggcaccagagccatcatgagagttgtcaactcctggctgtttaaacacctggctagagagatgcgacctaggatctgcacaaaagaagagttcatttccaaggtcaggagtcatgctgcaattggtgcatacttggaagaacatgaaaattggagaagcgctagcgaagctgtccaagacccacggttttggaagcttgtggatgaagaacggaaactccacctacaaggcaaatgcaggacctgtgtttacaacatgatgggcaagagagagaaaaaacctgctgagttcggaaaagccaaaggaagtagagccatctggtacatgtggcttggagcccggttcctggagtttgaagccctcggttttctgaatgaagatcattgggtgtcaagaggcaactccggtggaggggttgaaggaacaggcctgcagtacctagggtacatcctgaaaagacttggcgaaaaacctggagggcgtatgtatgcagatgacacagctggatgggacacgcgcataacagaagaggacttagaagatgaacaggaaattttaaagtatatgacaaaagatcataaaaaactggcctgggcggtcaccgagctggcatacaagaacaaagttgtcaaagtcatgcgaccggggaccaggaggcctaactttcatggacatcatatccaggcgtaccagagaggatccggacaagtcgtgacatatgctctgaacacagtaacaaacttgaaggttcaactcatccgcatggcagagtcagagcacgtcatcacaagacatgatgtggaatcggtgagtccaagcaccttgcgcggcctagaagactggctggaaagatttggaactgatagattgtccagaatggctgtgagtggtgacgactgcgtggtgaagcccattgatgaccagtttgcagacgctttgtaccacctgaatgccatgtccaagatcaggaaagacatagatgactggaaaccatcaactggctgggattcatgggaggcagtaccattctgctcccaccactttcatgagataatcttgaaagacgggagaaccatcatagctccatgccgggaccaagatgagctaataggaagagcccgtgtgtcaccaggaaatgggtggatgataagggaaacggcatgtcttagcaaggcatatgctcagatgtggttattgatgtactttcacagaagagatttgagggtgatggggaatgccatttgctcagccgtccctgttgattgggtgcctactgggagaaccacttggtctatacatggaaaaggggaatggatgactacagaaaacatgttagatgtgtggaaccgggtgtggatcatggagaatccttatcaggctgacaagacccctgtcactgagtggagagatgttccctacctgcccaagtctattgacaaaacctgcaactcattggtcggaacaacacaacgtgccacctgggcgcgtgatgtgaagcatactgttcaccgcatccggaagttggttggaaatgagaaattctatgattatatgtctaccatggaccgatatagagagctagacgaagaaggtccaggagaaatcctttggtag

SEQ ID NO: 14633 - DNA, 24 bp, unidentified
  source 1..24: mol_type = other DNA
  misc_feature 1..24: note = Synthetic
acgaagctgtgcgcgagcttttaa

SEQ ID NO: 14634 - DNA, 24 bp, unidentified
  misc_feature 1..24: note = Synthetic
  source 1..24: mol_type = other DNA
acgaagctgtgcgcgagcttttaa

SEQ ID NO: 14635 - DNA, 366 bp, unidentified
  source 1..366: mol_type = other DNA
  misc_feature 1..366: note = Synthetic
atgcaacgcgacagatggtttcgctgcagactgagttcgtaccaaacccaccgtcttccacctccctctgaggattctgtgcctattgccacaatggaaaggactcctggacttttagagtgtgaacatttgaatatgcattatagctctgctttggactccaccgtgctgttggacgatgtttctgaaggtttcatttccattacggatcagcgctttgccagcaaagaacctgtgttgattttgtcacagaagaatcgttgtgtaaatcctaaattgcagttgtttgcggtggtacagggggaaagggaggtgtataaggtaaagtggaaggggggagggagattaacggttagaattctgtaa

SEQ ID NO: 14636 - DNA, 867 bp, unidentified
  misc_feature 1..867: note = Synthetic
  source 1..867: mol_type = other DNA
atgcaacgcgacagatggtttcgctgcagactgagttcgtaccaaacccaccgtcttccacctccctctgaggattctgtgcctattgccacaatggaaaggactcctggacttttagagtgtgaacatttgaatatgcattatgtgagcgaggtgaggtctattccatcttgtgcgccttttgtagtattgcaggagtggccaatgtggtgggacatgatattgtctaaatgggaaaagcatgtgtgcaaaatttacatgcgtgtttgtgtttgctgtgccactattaatgttgattttaatcaaattgtaagaggttttgaacgctggactatacactgtcactgtattaaacctgggtctcttcaatgtaaggcggggggtgtagtgttagcaaattggtttaaaatgatgatttatggttcactgtataacttaagattcccttggtatcgagaaattgtaaattgtggcatgcccaaggaagtgttatttatggggagcgtgtttgtcagaggtaggcattttatatatattcgcctgctgtatgatgggcacgcggctatagtgttggagcgcatgtcgtttgggtggagtttttttagttatggaattatgaataatatggtggtgttgggctgtacctattgtaaaaacttggatgagctttctgtgcggtgctgcgctcgtcggacgcggcggctgctggccaaggcggtgaaagtgttgggaagcttcaccgttaggtcactcatgaggagcttggtggaaccccggagacagggattactgcggggcttgatggagcggtactgcccgtttacgttggcagactacaacagaggcgagaacccgtggagagcttga

SEQ ID NO: 14637 - DNA, 57 bp, unidentified; identical to SEQ ID NO: 7319
  source 1..57: mol_type = other DNA
  misc_feature 1..57: note = Synthetic

SEQ ID NO: 14638 - DNA, 768 bp, unidentified
  misc_feature 1..768: note = Synthetic
  source 1..768: mol_type = other DNA
acgccttccctctttttcaccgcagctaagagagagaaagagagtatgtcagtcaagggcgtggagatgccagaaatgacgtgggacttggacgttggaaataaatggcggcgtcgaaaggtcctgagtcgcattcaccggttctgggaatgtcgactacgggtgtggtggctgagtgacgccggcgtaagagaaaccgacccaccgcgtccccgacgccgcccgacttggatgaccgcggtgtttcacgttatctgtgccgttttgcttacgcttatgattatggccatcggcgcgctcatcgcgtacttaagatattaccaccaggacagttggcgagacatgctccacgatctattttgcggctgtcattatcctgagaagtgccgtcggcaccacgagcggcagagaagcagacggcgagccatggatgtgcccgacccggaactcggcgacccggcccgccggccgttgaacggggccatgtactacggcagcggctgtcgcttcgacacggtggaaatggtggacgagacgagacccgcgccgccggcgctgtcatcgcccgaaaccggcgacgatagcaacgacgacgcggttgccggcggaggtgctggcggggtaacatcatccgcgactcgtacgacgtcgtcgaacgcgctgctgccagaatggatggatgcggtacatgtggcggtccaagccgccgttcaagcgaccgtgcaagtaagtggcccgcgggagaacgccgtatctcccgctacgtaa

SEQ ID NO: 14639 - DNA, 108 bp, unidentified; identical to SEQ ID NO: 7322
  source 1..108: mol_type = other DNA
  misc_feature 1..108: note = Synthetic

SEQ ID NO: 14640 - DNA, 39 bp, unidentified; identical to SEQ ID NO: 7323
  source 1..39: mol_type = other DNA
  misc_feature 1..39: note = Synthetic

SEQ ID NO: 14641 - DNA, 189 bp, unidentified; identical to SEQ ID NO: 7332
  misc_feature 1..189: note = Synthetic
  source 1..189: mol_type = other DNA

SEQ ID NO: 14642 - DNA, 237 bp, unidentified
  misc_feature 1..237: note = Synthetic
  source 1..237: mol_type = other DNA
atggacgtgtccggagccaagcaacggcggcgcaagcgcaagccgcgtaccaccgtggaggagccgcccgcggactcgtgcaccacgtgctccgtgtgccagtcgcgcctcgcattcttctccgatgtgagcaagctgcaagccagcccgctgcgcatggccacgcccgggcccgacacgttgcactgcgcggcgtgcggatcggcactgtgtcccctgagcgagttcgcacgctag

SEQ ID NO: 14643 - DNA, 18 bp, unidentified
  misc_feature 1..18: note = Synthetic
  source 1..18: mol_type = other DNA
ataattagattaccctga

SEQ ID NO: 14644 - DNA, 705 bp, unidentified
  source 1..705: mol_type = other DNA
  misc_feature 1..705: note = Synthetic
ctgatgtcagattataatcctgatgtcctccagcagcttgtcaaggatggaatcaagactatcgagcttttacagcagagtccggaagactttcagaagacgtacggcagaagtgccatccaggagccgtcgacaagagccagaatccaaagttgggagtcccgcaatcccgatcatgattacaccggtaataaaaatcagagaagcgagggagctaaagagagagcaaacaagagcgagagcgcgggaactgcttcagctgatggaggacatggagataaaccctcaaataacgggggtgactcccaaaacgagtaccaagggtcagatcaacaggtatgggatgctgcgtataatgatgggaatagtggcggagcttggggaggtcccacaggtggacttcccacggctggagaaagagggtatcctatcacaacaggaaatcaagaatttgagggataccatcccgacggtccagttgatgctcgagagtataatcagataagctccatggatcatgagatgtctgctgcagaaactttgggctcgtctactcagctaactactatgagaaacgcaacaactgatgattttgcgaaaatttttgaggaggggacacctaaagtgcaccgacggctgagggggataactgctgttgtgccggctcaaaagcaaccaggggcagtcggtggacctgttaaaaaa

SEQ ID NO: 14645 - DNA, 483 bp, unidentified
  misc_feature 1..483: note = Synthetic
  source 1..483: mol_type = other DNA
atgtcctccagcagcttgtcaaggatggaatcaagactatcgagcttttacagcagagtccggaagactttcagaagacgtacggcagaagtgccatccaggagccgtcgacaagagccagaatccaaagttgggagtcccgcaatcccgatcatgattacaccggtaataaaaatcagagaagcgagggagctaaagagagagcaaacaagagcgagagcgcgggaactgcttcagctgatggaggacatggagataaaccctcaaataacgggggtgactcccaaaacgagtaccaagggtcagatcaacaggtatgggatgctgcgtataatgatgggaatagtggcggagcttggggaggtcccacaggtggacttcccacggctggagaaagagggtatcctatcacaacaggaaatcaagaatttgagggataccatcccgacggtccagttgatgctcgagagtataatcagataa

SEQ ID NO: 14646 - DNA, 159 bp, unidentified; identical to SEQ ID NO: 7341
  source 1..159: mol_type = other DNA
  misc_feature 1..159: note = Synthetic

SEQ ID NO: 14647 - DNA, 54 bp, unidentified; identical to SEQ ID NO: 7342
  misc_feature 1..54: note = Synthetic
  source 1..54: mol_type = other DNA

SEQ ID NO: 14648 - DNA, 21 bp, unidentified
  source 1..21: mol_type = other DNA
  misc_feature 1..21: note = Synthetic
atgccatctccaggaatatga

SEQ ID NO: 14649 - DNA, 42 bp, unidentified
  misc_feature 1..42: note = Synthetic
  source 1..42: mol_type = other DNA
atgaagattaagaaaaagcatcctttacttgagaggagctaa

SEQ ID NO: 14650 - DNA, 282 bp, unidentified
  source 1..282: mol_type = other DNA
  misc_feature 1..282: note = Synthetic
atgcccattaaggttagacagtggaggctggccgtgtcctgcacgctggcgtgctcagacgtgtgctacatctgcaacaagcgctcgccggaaggatgcataaacgcggcctgtcccggcgcgtgtccgttccaagtcatggtgtgcgggcacggctaccacgtccactgcctatcccccaccaacacggaagtgtgcttcgtgtgccgctccgcgctgcagaaagcggagcttccggacatgagcacgtcagaatcggcctcgcgcgagtttatggtatga

SEQ ID NO: 14651 - DNA, 189 bp, unidentified
  source 1..189: mol_type = other DNA
  misc_feature 1..189: note = Synthetic
atgacggcgcccaagtgtgtcaccaccacgacctatctggtcaagaccaaggagcagccctggtggcccgacaacgccatcaggagatggtggatcagcgttgccatcgtcatcttcatcggagtctgtctggtggccctgatgtactttacgcagcagcaggcacgcaacgggagcggcagcggctag

SEQ ID NO: 14652 - DNA, 48 bp, unidentified; identical to SEQ ID NO: 7352
  source 1..48: mol_type = other DNA
  misc_feature 1..48: note = Synthetic

SEQ ID NO: 14653 - DNA, 6447 bp, unidentified
  source 1..6447: mol_type = other DNA
  misc_feature 1..6447: note = Synthetic
ctgtttgacaccatgggcgcacaggtcagcaagcaaaatgtcggctcgcatgaaaactcagtctcagccacaggtggatccgtgattaagtatttcaacatcaattactacaaggattctgctagctctggcttgactaaacaagatttttcccaagacccatcgaaattcacacaacctctagcagaagcacttacaaatccagctttaatgtcaccaactgttgaagcatgtgggatgtccgataggcttaaacaaattactatcgggaattccactataacaacacaagatacactaaactctatactggcatatggggagtggcccaaatacttgagtgacctggacgcttcctcagtggataaacctacccacccagaaacatcatctgatagattttacacattaactagtgtagattggaccactacgtctaaaggttggtggtggaagttgcctgattgccttaaagatatgggcatcttcgggcaaaatctgtaccatcatgcattgggtaggtcagggtacataatacacacccaatgtaatgccacaaaattcaatagtggttgtctaatagtggctgttgtaccagaacaccagctagcttacataggtgaagcaaatgtcaatgttggttatgatcacacacaccctggtgagggaggacatgtaattggttcaaatgttaggagagataacaagcaacctgatgaagaccccttctttaattgtaatgggaccctgcttggtaacatcactatattcccacaccagctcataaacttgaggacaaacaattccagcacaattgttgtaccatacattaattgtgtacctatggacaacatgctcaggcacaacaacctatctctagttattattccaatcgttcctctcagagccgcaaatggtgtcaccaaggtccccattacaatctcaatagcaccagataagtcagagttctcaggggctagacagtctgtaaaacaggggttaccaacacggctgccaagtggatctcaacaatttctcacaactgaggacgagcagtcggctaatcttctaccagactttagtgtcacaaagatcatcgacattcctggtaggatcacaaacatactccacatggctatggtagattcattcatgccactaaacaacattgagaccaatgtaggacaaatctcaatttacaatgtacaagtgaccaagaaaacagcagacaagcccatagttgtgatacccatggacattagcaacactctcttttctaccactttactaggtgaagttcttaattactttgcaaattggtcaggtagtatctctataacttttatgtgtgtttgtgatagctttagtacaggtaaatttttgctagcatacacacccccaggagccgctttgccaccagacaggaaaaccgcaatgttaggtgtacatgtaatctgggatttgggactccaatcctcgtgcaccattgtagtaccatggatgagcggcaccttccatagacggactaaagctgacaattacacccaggctggatatgtgtcactatggtaccagactgattttgtgtcaccaaatgatgggattgggacaatcgttgctacatgctccggatgtcctgatttgtctgttagaatgctgcgtgacacaccaatgatgaaacaggaaaaagatttgactcaaaacccagttgaggactacatagacaaggtggtcgacactgtactacaggtcccaaacacccaacccagtggtccacaacacagtattcaaccaagtgctttgggcgctatggaaattggggcatcttcaaccaccataccaggtgatctcatagagactaggtatgtaatcaactcaaatactaacagtgaagccctaattgagaacttcatgggccgctcagctctttgggccaagatccaggtggcgaatggttttgcaaaatgggatataaacttccaagagcatgcacaagtcagaaagaaatttgaaatgtttacatatgctagatttgacatggaagttactgttgtcaccaacaacacaggtttggtacaaatcatgtttgtaccacctggtatagatgcaccagatagtattgactcccgtctatgggattctgcctccaacccgagtgttttctatcaaccaaaatcaggttttcctaggtttactattccattcactggattgggttcagcttattatatgttttatgatggttatgatgtccccagaaataaaagtaatgctgtgtatggtatcacatctacaaatgatatggggacactttgcttcagagctatggaagacaccaatgaacacagcattagagtctttgtaaagcctaaacataccatagcatggattccacgaccacctcgtgccacccaatacacccacaaattcagcacaaactaccatgttaagaaaccagatgacactactggactactaatacagaaacactttattaaccacaggactgatataaaaactgcaggcccaagtgatctctttgtccatacagccactatgatttacaggaatgcgcacttaaccagcttgaatgacaaaaccgttctactggctctcagtgcagatctccaggtggacgcagctgaccagccaggcccagataccatcccacaatgtgactgcttggagggctgctactatagcaaaagtttagatagatatataccagttaaattagaagcacacgactggtatcagatagaggaaacctgttattacccacagcacatccagtataatataatgattggtgaaggacattgtcagcctggagactgcggagggaagttactgtgcactcatggtgtgattggcatcatcacagctggtggagacaatcatgtagctttcacagatctaagaccctattcatgtttagacactcaccaaggtcctattcaggactatgtgacacaattagggagtgcctttggtagcggtttcactgacacacttaaagaccaattgacagatgtgagtgcccatattaaagacaaaattacttcaaaggtagttaaatggctagtacgtatcatcagtgcacttaccataatgatacgtaacagtactgacacacccactgtacttgcaacccttgctcttttaggctgtcacaagtcaccatggtcatttctcaaggaccggttatgtcagtggttaaacatcactagaccgccaagccgacaaggtgatggctggttgaagaaattcactgaatgctgcaacgccgctaagggccttgagtggattggcattaagatcagtaaatttatagaatggcttaaaaatagactgcttcctaccttacaacacaaaaaagaaatcttagatgaatgcaagaaaatagatctttatcaagaacaggttaaaggattttccaaagttgatgaaccagctcagcaggaactactaattaaagttgaaaaactgaagaaaggtttagacagcctagcacctctgtatgcagttgaaaacaaaagagttacaaacatctataaagaactcaaagcattgtctgcatataaaacaacacagagaactgaaccagtatgcatactgatcagaggagctcctgggtgtgggaaatctttggttacttcaataatagccagaggtttaaccaaaccaggtgacatttactcccttcctccagaccctaaacattttgatgggtatgatcaacaagaagtggtaattatggatgatctgggccaaaaccctgatggtaaggacctttctatgttctgtcagatggtgtcaaccactaatttcattcccccaatggcagctctggaagataaggggaagacctttacaagtaaatatatattagccagcacaaatcttttaaatctccaaccacccacagtaacagtccccgaagccattgacaggcgcttctacttagatttagatcttaagatcttgcaagggtaccaaaatcaagtaggcttgctagatactgccaaagcacttcagccctgtgcgaactgtagtaagccaccacattacaaacaatgttgtcctttgctatgtggtaaagctgtagtactggtgaacaggagaactaagggcagttatgctatcaacatggtggttcagcaacttatagaggagagcaaatccagaaagagtgttggcaataatttaacagctatatttcagggcttgggtgataaggaaaccccaggtttcataatagatcttctatcatcatctaaagaccctaaagtcattcaatactgccaagaccagggctacatctcaccagtccatggctcaattgagcgagattttgcttatgtcacatatgctctaaattgtctaggtagtcttgtgattattctgggtaccatatacgcattatatcgcttgatgtgtattgcccaaggaccatacacaggcatgcctactacacccaagaagaaacctgagttaagaagagcaaccttgcaaggtcctgaacatgaatttttgaatgcccttattagaagaaactgccatatcattaccactgacaaaggagaatttaacctactaggtatatactctaactgtgctgtagtaccaacacatgctgaacctggtgacgtggtagatattgatggaaggttagttagagtgcttaaacaacaagtcctcactgatatgaatgatgtggatacggaagtaactgtgttgtggcttgaccagaatgaaaagttcagagacataagaagatttatacctgaacatcagcaagattggcacaatatacatttagctaccaatgtcaccaaattccctatgctcaatgtagaagtaggacacactgtaccctatggggaaatcaatcttagtggtaatgctacatgcaggttgtacaaatatgactatccaacccaaccaggtcaatgtggtgcagtgctggccaacacaggtaatatcataggaatacatgtgggtggaaatggtagggttggttacgcagcagcactacttaggaaatattttgctgaggaacaaggtgccatcatttctaaatgtaatgttaaggaaaagaactggaaacccgtcaatacaccctcccagaccaaactacaccctagtgtcttccacgatgtgtttcctggtgttaaggaaccagcagctttacaccccaaggatccacgattggaagtagacctcactacagctgttatgtcaaaatataaaggtaatattgatgtccctatgaatgagtacatagaaacagccgttgaccactacgcggcacaactttacatgcttgacatcaacccagaaccaatcaccatggaacaagcaatatatggttatgctaacttggaaccattggaccttaccactagccctggtttcccttatgtgtctttgggcgtgaaaaagaaagacatcttaaacaacgctactaaagacacaaggaaaatgcaacagatgttagatctgtatggtattgatctaccctacataactttcctaaaggatgaactccgcgccccagagaaaattaaggctggtaagaccaggattgtggaggctgctagtgtcaatgatacagtgtactttagaacaacttttggcaatctatacagtacttttcatgcaaacccaggtatcttaacaggctcagctgtggggtgtaatccagatgtgttttggtcacaaatgcatgctatgttagatggagaactcattgcttttgattacaccaattatgatggcagcttggaaccagtgtggtttaaagcgcttgggaaagtgttagatcagcttggcttccctggacaccttacacaaagattgtgtaatacaacccacatcttcagagacacaacctacgatgtcaaaggtggcatgccgtcaggaatttcaggtacctccatatttaacactatgatgaacaatatcataataagaactctggtcttggagacttacaaaaacatcaatttggacaaactacgcattattgcctacggtgatgatgtagtagcctcatatccagatgaattggacccaaaggagattgccatgacggccaagcgttatggtctcactatcactcccccagataaaacagatcaattttccaagatgacctgggataatgtgaccttccttaaacgtaaatttaaacctgactccaaatacaaatttctgatacatcctgtttactcaatgcaggatgtttatgagtcaatcagatggactaaggatccaaagaacacgcaggaccacgtccattcgttgtgtttgttagcctggcacaatggagaagaggtttatgaggatttctgcgccaaaattaggacaactagtgttggcaagagtctgtatttaccaccatacaaatacttgtacagacagtggattgacctcttcatttga

SEQ ID NO: 14654 - DNA, 2454 bp, unidentified
  source 1..2454: mol_type = other DNA
  misc_feature 1..2454: note = Synthetic
ctggccatttccttctcctataggcagaaaaagatcatggagtcagtcgagaaggaggacagcctaaccgccccctttgagttcgccaccaccgcctccaccgatgccgccaacgcgcctaccaccttccccgtcgaggcacccccgcttgaggaggaggaagtgattatcgagcaggacccaggttttgtaagcgaagacgacgaggatcgctcagtaccaacagaggataaaaagcaagaccaggacgacgcagaggcaaacgaggaacaagtcgggcggggggaccaaaggcatggcgactacctagatgtgggagacgacgtgctgttgaagcatctgcagcgccagtgcgccattatctgcgacgcgttgcaagagcgcagcgatgtgcccctcgccatagcggatgtcagccttgcctacgaacgccacctgttctcaccgcgcgtaccccccaaacgccaagaaaacggcacatgcgagcccaacccgcgcctcaacttctaccccgtatttgccgtgccagaggtgcttgccacctatcacatctttttccaaaactgcaagatacccctatcctgccgtgccaaccgcagccgagcggacaagcagctggccttgcggcagggcgctgtcatacctgatatcgcctcgctcgacgaagtgccaaaaatctttgagggtcttggacgcgacgagaaacgcgcggcaaacgctctgcaacaagaaaacagcgaaaatgaaagtcactgtggagtgctggtggaacttgagggtgacaacgcgcgcctagccgtgctgaaacgcagcatcgaggtcacccactttgcctacccggcacttaacctaccccccaaggttatgagcacagtcatgagcgagctgatcgtgcgccgtgcacgacccctggagagggatgcaaacttgcaagaacaaaccgaggagggcctacccgcagttggcgatgagcagctggcgcgctggcttgagacgcgcgagcctgccgacttggaggagcgacgcaagctaatgatggccgcagtgcttgttaccgtggagcttgagtgcatgcagcggttctttgctgacccggagatgcagcgcaagctagaggaaacgttgcactacacctttcgccagggctacgtgcgccaggcctgcaaaatttccaacgtggagctctgcaacctggtctcctaccttggaattttgcacgaaaaccgcctcgggcaaaacgtgcttcattccacgctcaagggcgaggcgcgccgcgactacgtccgcgactgcgtttacttatttctgtgctacacctggcaaacggccatgggcgtgtggcagcaatgcctggaggagcgcaacctaaaggagctgcagaagctgctaaagcaaaacttgaaggacctatggacggccttcaacgagcgctccgtggccgcgcacctggcggacattatcttccccgaacgcctgcttaaaaccctgcaacagggtctgccagacttcaccagtcaaagcatgttgcaaaactttaggaactttatcctagagcgttcaggaattctgcccgccacctgctgtgcgcttcctagcgactttgtgcccattaagtaccgtgaatgccctccgccgctttggggtcactgctaccttctgcagctagccaactaccttgcctaccactccgacatcatggaagacgtgagcggtgacggcctactggagtgtcactgtcgctgcaacctatgcaccccgcaccgctccctggtctgcaattcgcaactgcttagcgaaagtcaaattatcggtacctttgagctgcagggtccctcgcctgacgaaaagtccgcggctccggggttgaaactcactccggggctgtggacgtcggcttaccttcgcaaatttgtacctgaggactaccacgcccacgagattaggttctacgaagaccaatcccgcccgccaaatgcggagcttaccgcctgcgtcattacccagggccacatccttggccaattgcaagccatcaacaaagcccgccaagagtttctgctacgaaagggacggggggtttacctggacccccagtccggcgaggagctcaacccaatccccccgccgccgcagccctatcagcagccgcgggcccttgcttcccaggatggcacccaaaaagaagctgcagctgccgccgccgccacccacggacgaggaggaatactgggacagtcaggcagaggaggttttggacgaggaggaggagatgatggaagactgggacagcctagacgaagcttccgaggccgaagaggtgtcagacgaaacaccgtcaccctcggtcgcattcccctcgccggcgccccagaaattggcaaccgttcccagcatcgctacaacctccgctcctcaggcgccgccggcactgcctgttcgccgacccaaccgtag

SEQ ID NO: 14655 - DNA, 63 bp, unidentified; identical to SEQ ID NO: 7356
  misc_feature 1..63: note = Synthetic
  source 1..63: mol_type = other DNA

SEQ ID NO: 14656 - DNA, 27 bp, unidentified
  source 1..27: mol_type = other DNA
  misc_feature 1..27: note = Synthetic
attaacacagtgcgagctgtttcttag

SEQ ID NO: 14657 - DNA, 27 bp, unidentified
  source 1..27: mol_type = other DNA
  misc_feature 1..27: note = Synthetic
attaacacagtgcgagctgtttcttag

SEQ ID NO: 14658 - DNA, 27 bp, unidentified
  source 1..27: mol_type = other DNA
  misc_feature 1..27: note = Synthetic
attaacacagtgcgagctgtttcttag

SEQ ID NO: 14659 - DNA, 10326 bp, unidentified
  source 1..10326: mol_type = other DNA
  misc_feature 1..10326: note = Synthetic
ctgtttcttagcacgaagatctcgatgtctaagaaaccaggagggcccggcaagagccgggctgtcaatatgctaaaacgcggaatgccccgcgtgttgtccttgattggactgaagagggctatgttgagcctgatcgacggcaaggggccaatacgatttgtgttggctctcttggcgttcttcaggttcacagcaattgctccgacccgagcagtgctggatcgatggagaggtgtgaacaaacaaacagcgatgaaacaccttctgagttttaagaaggaactagggaccttgaccagtgctatcaatcggcggagctcaaaacaaaagaaaagaggaggaaagaccggaattgcagtcatgattggcctgatcgccagcgtaggagcagttaccctctctaacttccaagggaaggtgatgatgacggtaaatgctactgacgtcacagatgtcatcacgattccaacagctgctggaaagaacctatgcattgtcagagcaatggatgtgggatacatgtgcgatgatactatcacttatgaatgcccagtactgtcggctggtaatgatccagaagacatcgactgttggtgcacaaagtcagcagtctacgtcaggtatggaagatgcaccaagacacgccactcaagacgcagtcggaggtcactgacagtgcagacacacggagaaagcactctagcgaacaagaagggggcttggatggacagcaccaaggccacaaggtatttggtaaaaacagaatcatggatcttgaggaaccctggatatgccctggtggcagccgtcattggttggatgcttgggagcaacaccatgcagagagttgtgtttgtcgtgctattgcttttggtggccccagcttacagcttcaactgccttggaatgagcaacagagacttcttggaaggagtgtctggagcaacatgggtggatttggttctcgaaggcgacagctgcgtgactatcatgtctaaggacaagcctaccatcgatgtgaagatgatgaatatggaggcggccaacctggcagaggtccgcagttattgctatttggctaccgtcagcgatctctccaccaaagctgcgtgcccgaccatgggagaagctcacaatgacaaacgtgctgacccagcttttgtgtgcagacaaggagtggtggacaggggctggggcaacggctgcggactatttggcaaaggaagcattgacacatgcgccaaatttgcctgctctaccaaggcaataggaagaaccatcttgaaagagaatatcaagtacgaagtggccatttttgtccatggaccaactactgtggagtcgcacggaaactactccacacaggttggagccactcaggcagggagactcagcatcactcctgcggcgccttcatacacactaaagcttggagaatatggagaggtgacagtggactgtgaaccacggtcagggattgacaccaatgcatactacgtgatgactgttggaacaaagacgttcttggtccatcgtgagtggttcatggacctcaacctcccttggagcagtgctggaagtactgtgtggaggaacagagagacgttaatggagtttgaggaaccacacgccacgaagcagtctgtgatagcattgggctcacaagagggagctctgcatcaagctttggctggagccattcctgtggaattttcaagcaacactgtcaagttgacgtcgggtcatttgaagtgtagagtgaagatggaaaaattgcagttgaagggaacaacctatggcgtctgttcaaaggctttcaagtttcttgggactcccgcagacacaggtcacggcactgtggtgttggaattgcagtacactggcacggatggaccttgcaaagttcctatctcgtcagtggcttcattgaacgacctaacgccagtgggcagattggtcactgtcaacccttttgtttcagtggccacggccaacgctaaggtcctgattgaattggaaccaccctttggagactcatacatagtggtgggcagaggagaacaacagatcaatcaccattggcacaagtctggaagcagcattggcaaagcctttacaaccaccctcaaaggagcgcagagactagccgctctaggagacacagcttgggactttggatcagttggaggggtgttcacctcagttgggaaggctgtccatcaagtgttcggaggagcattccgctcactgttcggaggcatgtcctggataacgcaaggattgctgggggctctcctgttgtggatgggcatcaatgctcgtgataggtccatagctctcacgtttctcgcagttggaggagttctgctcttcctctccgtgaacgtgcacgctgacactgggtgtgccatagacatcagccggcaagagctgagatgtggaagtggagtgttcatacacaatgatgtggaggcttggatggaccggtacaagtattaccctgaaacgccacaaggcctagccaagatcattcagaaagctcataaggaaggagtgtgcggtctacgatcagtttccagactggagcatcaaatgtgggaagcagtgaaggacgagctgaacactcttttgaaggagaatggtgtggaccttagtgtcgtggttgagaaacaggagggaatgtacaagtcagcacctaaacgcctcaccgccaccacggaaaaattggaaattggctggaaggcctggggaaagagtattttatttgcaccagaactcgccaacaacacctttgtggttgatggtccggagaccaaggaatgtccgactcagaatcgcgcttggaatagcttagaagtggaggattttggatttggtctcaccagcactcggatgttcctgaaggtcagagagagcaacacaactgaatgtgactcgaagatcattggaacggctgtcaagaacaacttggcgatccacagtgacctgtcctattggattgaaagcaggctcaatgatacgtggaagcttgaaagggcagttctgggtgaagtcaaatcatgtacgtggcctgagacgcataccttgtggggcgatggaatccttgagagtgacttgataataccagtcacactggcgggaccacgaagcaatcacaatcggagacctgggtacaagacacaaaaccagggcccatgggacgaaggccgggtagagattgacttcgattactgcccaggaactacggtcaccctgagtgagagctgcggacaccgtggacctgccactcgcaccaccacagagagcggaaagttgataacagattggtgctgcaggagctgcaccttaccaccactgcgctaccaaactgacagcggctgttggtatggtatggagatcagaccacagagacatgatgaaaagaccctcgtgcagtcacaagtgaatgcttataatgctgatatgattgacccttttcagttgggccttctggtcgtgttcttggccacccaggaggtccttcgcaagaggtggacagccaagatcagcatgccagctatactgattgctctgctagtcctggtgtttgggggcattacttacactgatgtgttacgctatgtcatcttggtgggggcagctttcgcagaatctaattcgggaggagacgtggtacacttggcgctcatggcgaccttcaagatacaaccagtgtttatggtggcatcgtttctcaaagcgagatggaccaaccaggagaacattttgttgatgttggcggctgttttctttcaaatggcttatcacgatgcccgccaaattctgctctgggagatccctgatgtgttgaattcactggcggtagcttggatgatactgagagccataacattcacaacgacatcaaacgtggttgttccgctgctagccctgctaacacccgggctgagatgcttgaatctggatgtgtacaggatactgctgttgatggtcggaataggcagcttgatcagggagaagaggagtgcagccgcaaaaaagaaaggagcaagtctgctatgcttggctctagcctcaacaggacttttcaaccccatgatccttgctgctggactgattgcatgtgatcccaaccgtaaacgcggatggcccgcaactgaagtgatgacagctgtcggcctaatgtttgccatcgtcggagggctggcagagcttgacattgactccatggccattccaatgactatcgcggggctcatgtttgctgctttcgtgatttctgggaaatcaacagatatgtggattgagagaacggcggacatttcctgggaaagtgatgcagaaattacaggctcgagcgaaagagttgatgtgcggcttgatgatgatggaaacttccagctcatgaatgatccaggagcaccttggaagatatggatgctcagaatggtctgtctcgcgattagtgcgtacaccccctgggcaatcttgccctcagtagttggattttggataactctccaatacacaaagagaggaggcgtgttgtgggacactccctcaccaaaggagtacaaaaagggggacacgaccaccggcgtctacaggatcatgactcgtgggctgctcggcagttatcaagcaggagcgggcgtgatggttgaaggtgttttccacaccctttggcatacaacaaaaggagccgctttgatgagcggagagggccgcctggacccatactggggcagtgtcaaggaggatcgactttgttacggaggaccctggaaattgcagcacaagtggaacgggcaggatgaggtgcagatgattgtggtggaacctggcaagaacgttaagaacgtccagacgaaaccaggggtgttcaaaacacctgaaggagaaatcggggccgtgactttggacttccccactggaacatcaggctcaccaatagtggacaaaaacggtgatgtgattgggctttatggcaatggagtcataatgcccaacggctcatacataagcgcgatagtgcagggtgaaaggatggatgagccaatcccagccggattcgaacctgagatgctgaggaaaaaacagatcactgtactggatctccatcccggcgccggtaaaacaaggaggattctgccacagatcatcaaagaggccataaacagaagactgagaacagccgtgctagcgccaaccagggttgtggctgctgagatggctgaagcactgagaggactgcccatccggtaccagacatccgcagtgcccagagaacataatggaaatgagattgttgatgtcatgtgtcatgctaccctcacccacaggctgatgtctcctcacagggtgccgaactacaacctgttcgtgatggatgaggctcatttcaccgacccagctagcattgcagcaagaggttacatttccacaaaggtcgagctaggggaggcggcggcaatattcatgacagccaccccaccaggcacttcagatccattcccagagtccaattcaccaatttccgacttacagactgagatcccggatcgagcttggaactctggatacgaatggatcacagaatacaccgggaagacggtttggtttgtgcctagtgtcaagatggggaatgagattgccctttgcctacaacgtgctggaaagaaagtagtccaattgaacagaaagtcgtacgagacggagtacccaaaatgtaagaacgatgattgggactttgttatcacaacagacatatctgaaatgggggctaacttcaaggcgagcagggtgattgacagccggaagagtgtgaaaccaaccatcataacagaaggagaagggagagtgatcctgggagaaccatctgcagtgacagcagctagtgccgcccagagacgtggacgtatcggtagaaatccgtcgcaagttggtgatgagtactgttatggggggcacacgaatgaagacgactcgaacttcgcccattggactgaggcacgaatcatgctggacaacatcaacatgccaaacggactgatcgctcaattctaccaaccagagcgtgagaaggtatataccatggatggggaataccggctcagaggagaagagagaaaaaactttctggaactgttgaggactgcagatctgccagtttggctggcttacaaggttgcagcggctggagtgtcataccacgaccggaggtggtgctttgatggtcctaggacaaacacaattttagaagacaacaacgaagtggaagtcatcacgaagcttggtgaaaggaagattctgaggccgcgctggattgatgccagggtgtactcggatcaccaggcactaaaggcgttcaaggacttcgcctcgggaaaacgttctcagatagggctcattgaggttctgggaaagatgcctgagcacttcatggggaagacatgggaagcacttgacaccatgtacgttgtggccactgcagagaaaggaggaagagctcacagaatggccctggaggaactgccagatgctcttcagacaattgccttgattgccttattgagtgtgatgaccatgggagtattcttcctcctcatgcagcggaagggcattggaaagataggtttgggaggcgctgtcttgggagtcgcgacctttttctgttggatggctgaagttccaggaacgaagatcgccggaatgttgctgctctcccttctcttgatgattgtgctaattcctgagccagagaagcaacgttcgcagacagacaaccagctagccgtgttcctgatttgtgtcatgacccttgtgagcgcagtggcagccaacgagatgggttggctagataagaccaagagtgacataagcagtttgtttgggcaaagaattgaggtcaaggagaatttcagcatgggagagtttcttctggacttgaggccggcaacagcctggtcactgtacgctgtgacaacagcggtcctcactccactgctaaagcatttgatcacgtcagattacatcaacacctcattgacctcaataaacgttcaggcaagtgcactattcacactcgcgcgaggcttccccttcgtcgatgttggagtgtcggctctcctgctagcagccggatgctggggacaagtcaccctcaccgttacggtaacagcggcaacactccttttttgccactatgcctacatggttcccggttggcaagctgaggcaatgcgctcagcccagcggcggacagcggccggaatcatgaagaacgctgtagtggatggcatcgtggccacggacgtcccagaattagagcgcaccacacccatcatgcagaagaaagttggacagatcatgctgatcttggtgtctctagctgcagtagtagtgaacccgtctgtgaagacagtacgagaagccggaattttgatcacggccgcagcggtgacgctttgggagaatggagcaagctctgtttggaacgcaacaactgccatcggactctgccacatcatgcgtgggggttggttgtcatgtctatccataacatggacactcataaagaacatggaaaaaccaggactaaaaagaggtggggcaaaaggacgcaccttgggagaggtttggaaagaaagactcaaccagatgacaaaagaagagttcactaggtaccgcaaagaggccatcatcgaagtcgatcgctcagcggcaaaacacgccaggaaagaaggcaatgtcactggagggcatccagtctctaggggcacagcaaaactgagatggctggtcgaacggaggtttctcgaaccggtcggaaaagtgattgaccttggatgtggaagaggcggttggtgttactatatggcaacccaaaaaagagtccaagaagtcagagggtacacaaagggcggtcccggacatgaagagccccaactagtgcaaagttatggatggaacattgtcaccatgaagagtggagtggatgtgttctacagaccttctgagtgttgtgacaccctcctttgtgacatcggagagtcctcgtcaagtgctgaggttgaagagcataggacgattcgggtccttgaaatggttgaggactggctgcaccgagggccaagggaattttgcgtgaaggtgctctgtccctacatgccgaaagtcatagagaagatggagctgctccaacgccggtatggggggggactggtcagaaacccactctcacggaattccacgcacgagatgtattgggtgagtcgagcttcaggcaatgtggtacattcagtgaatatgaccagccaggtgctcctaggaagaatggaaaaaaggacctggaagggaccccaatacgaggaagatgtaaacttgggaagtggaaccagggcggtgggaaaacccctgctcaactcagacaccagtaaaatcaagaacaggattgaacgactcaggcgtgagtacagttcgacgtggcaccacgatgagaaccacccatatagaacctggaactatcacggcagttatgatgtgaagcccacaggctccgccagttcgctggtcaatggagtggtcaggctcctctcaaaaccatgggacaccatcacgaatgttaccaccatggccatgactgacactactcccttcgggcagcagcgagtgttcaaagagaaggtggacacgaaagctcctgaaccgccagaaggagtgaagtacgtgctcaacgagaccaccaactggttgtgggcgtttttggccagagaaaaacgtcccagaatgtgctctcgagaggaattcataagaaaggtcaacagcaatgcagctttgggtgccatgtttgaagagcagaatcaatggaggagcgccagagaagcagttgaagatccaaaattttgggagatggtggatgaggagcgcgaggcacatctgcggggggaatgtcacacttgcatttacaacatgatgggaaagagagagaaaaaacccggagagttcggaaaggccaagggaagcagagccatttggttcatgtggctcggagctcgctttctggagttcgaggctctgggttttctcaatgaagaccactggcttggaagaaagaactcaggaggaggtgtcgagggcttgggcctccaaaaactgggttacatcctgcgtgaagttggcacccggcctgggggcaagatctatgctgatgacacagctggctgggacacccgcatcacgagagctgacttggaaaatgaagctaaggtgcttgagctgcttgatggggaacatcggcgtcttgccagggccatcattgagctcacctatcgtcacaaagttgtgaaagtgatgcgcccggctgctgatggaagaaccgtcatggatgttatctccagagaagatcagagggggagtggacaagttgtcacctacgccctaaacactttcaccaacctggccgtccagctggtgaggatgatggaaggggaaggagtgattggcccagatgatgtggagaaactcacaaaagggaaaggacccaaagtcaggacctggctgtttgagaatggggaagaaagactcagccgcatggctgtcagtggagatgactgtgtggtaaagcccctggacgatcgctttgccacctcgctccacttcctcaatgctatgtcaaaggttcgcaaagacatccaagagtggaaaccgtcaactggatggtatgattggcagcaggttccattttgctcaaaccatttcactgaattgatcatgaaagatggaagaacactggtggttccatgccgaggacaggatgaattggtaggcagagctcgcatatctccaggggccggatggaacgtccgcgacactgcttgtctggctaagtcttatgcccagatgtggctgcttctgtacttccacagaagagacctgcggctcatggccaacgccatttgctccgctgtccctgtgaattgggtccctaccggaagaaccacgtggtccatccatgcaggaggagagtggatgacaacagaggacatgttggaggtctggaaccgtgtttggatagaggagaatgaatggatggaagacaaaaccccagtggagaaatggagtgacgtcccatattcaggaaaacgagaggacatctggtgtggcagcctgattggcacaagagcccgagccacgtgggcagaaaacatccaggtggctatcaaccaagtcagagcaatcatcggagatgagaagtatgtggactacatgagttcactaaagagatatgaagacacaactttggttgaggacacagtactgtag

SEQ ID NO: 14660 - DNA, 7686 bp, unidentified
  misc_feature 1..7686: note = Synthetic
  source 1..7686: mol_type = other DNA
ctgtttcttagcacgaagatctcgatgtctaagaaaccaggagggcccggcaagagccgggctgtcaatatgctaaaacgcggaatgccccgcgtgttgtccttgattggactgaagagggctatgttgagcctgatcgacggcaaggggccaatacgatttgtgttggctctcttggcgttcttcaggttcacagcaattgctccgacccgagcagtgctggatcgatggagaggtgtgaacaaacaaacagcgatgaaacaccttctgagttttaagaaggaactagggaccttgaccagtgctatcaatcggcggagctcaaaacaaaagaaaagaggaggaaagaccggaattgcagtcatgattggcctgatcgccagcgtaggagcagttaccctctctaacttccaagggaaggtgatgatgacggtaaatgctactgacgtcacagatgtcatcacgattccaacagctgctggaaagaacctatgcattgtcagagcaatggatgtgggatacatgtgcgatgatactatcacttatgaatgcccagtactgtcggctggtaatgatccagaagacatcgactgttggtgcacaaagtcagcagtctacgtcaggtatggaagatgcaccaagacacgccactcaagacgcagtcggaggtcactgacagtgcagacacacggagaaagcactctagcgaacaagaagggggcttggatggacagcaccaaggccacaaggtatttggtaaaaacagaatcatggatcttgaggaaccctggatatgccctggtggcagccgtcattggttggatgcttgggagcaacaccatgcagagagttgtgtttgtcgtgctattgcttttggtggccccagcttacagcttcaactgccttggaatgagcaacagagacttcttggaaggagtgtctggagcaacatgggtggatttggttctcgaaggcgacagctgcgtgactatcatgtctaaggacaagcctaccatcgatgtgaagatgatgaatatggaggcggccaacctggcagaggtccgcagttattgctatttggctaccgtcagcgatctctccaccaaagctgcgtgcccgaccatgggagaagctcacaatgacaaacgtgctgacccagcttttgtgtgcagacaaggagtggtggacaggggctggggcaacggctgcggactatttggcaaaggaagcattgacacatgcgccaaatttgcctgctctaccaaggcaataggaagaaccatcttgaaagagaatatcaagtacgaagtggccatttttgtccatggaccaactactgtggagtcgcacggaaactactccacacaggttggagccactcaggcagggagactcagcatcactcctgcggcgccttcatacacactaaagcttggagaatatggagaggtgacagtggactgtgaaccacggtcagggattgacaccaatgcatactacgtgatgactgttggaacaaagacgttcttggtccatcgtgagtggttcatggacctcaacctcccttggagcagtgctggaagtactgtgtggaggaacagagagacgttaatggagtttgaggaaccacacgccacgaagcagtctgtgatagcattgggctcacaagagggagctctgcatcaagctttggctggagccattcctgtggaattttcaagcaacactgtcaagttgacgtcgggtcatttgaagtgtagagtgaagatggaaaaattgcagttgaagggaacaacctatggcgtctgttcaaaggctttcaagtttcttgggactcccgcagacacaggtcacggcactgtggtgttggaattgcagtacactggcacggatggaccttgcaaagttcctatctcgtcagtggcttcattgaacgacctaacgccagtgggcagattggtcactgtcaacccttttgtttcagtggccacggccaacgctaaggtcctgattgaattggaaccaccctttggagactcatacatagtggtgggcagaggagaacaacagatcaatcaccattggcacaagtctggaagcagcattggcaaagcctttacaaccaccctcaaaggagcgcagagactagccgctctaggagacacagcttgggactttggatcagttggaggggtgttcacctcagttgggaaggctgtccatcaagtgttcggaggagcattccgctcactgttcggaggcatgtcctggataacgcaaggattgctgggggctctcctgttgtggatgggcatcaatgctcgtgataggtccatagctctcacgtttctcgcagttggaggagttctgctcttcctctccgtgaacgtgcacgctgacactgggtgtgccatagacatcagccggcaagagctgagatgtggaagtggagtgttcatacacaatgatgtggaggcttggatggaccggtacaagtattaccctgaaacgccacaaggcctagccaagatcattcagaaagctcataaggaaggagtgtgcggtctacgatcagtttccagactggagcatcaaatgtgggaagcagtgaaggacgagctgaacactcttttgaaggagaatggtgtggaccttagtgtcgtggttgagaaacaggagggaatgtacaagtcagcacctaaacgcctcaccgccaccacggaaaaattggaaattggctggaaggcctggggaaagagtattttatttgcaccagaactcgccaacaacacctttgtggttgatggtccggagaccaaggaatgtccgactcagaatcgcgcttggaatagcttagaagtggaggattttggatttggtctcaccagcactcggatgttcctgaaggtcagagagagcaacacaactgaatgtgactcgaagatcattggaacggctgtcaagaacaacttggcgatccacagtgacctgtcctattggattgaaagcaggctcaatgatacgtggaagcttgaaagggcagttctgggtgaagtcaaatcatgtacgtggcctgagacgcataccttgtggggcgatggaatccttgagagtgacttgataataccagtcacactggcgggaccacgaagcaatcacaatcggagacctgggtacaagacacaaaaccagggcccatgggacgaaggccgggtagagattgacttcgattactgcccaggaactacggtcaccctgagtgagagctgcggacaccgtggacctgccactcgcaccaccacagagagcggaaagttgataacagattggtgctgcaggagctgcaccttaccaccactgcgctaccaaactgacagcggctgttggtatggtatggagatcagaccacagagacatgatgaaaagaccctcgtgcagtcacaagtgaatgcttataatgctgatatgattgacccttttcagttgggccttctggtcgtgttcttggccacccaggaggtccttcgcaagaggtggacagccaagatcagcatgccagctatactgattgctctgctagtcctggtgtttgggggcattacttacactgatgtgttacgctatgtcatcttggtgggggcagctttcgcagaatctaattcgggaggagacgtggtacacttggcgctcatggcgaccttcaagatacaaccagtgtttatggtggcatcgtttctcaaagcgagatggaccaaccaggagaacattttgttgatgttggcggctgttttctttcaaatggcttatcacgatgcccgccaaattctgctctgggagatccctgatgtgttgaattcactggcggtagcttggatgatactgagagccataacattcacaacgacatcaaacgtggttgttccgctgctagccctgctaacacccgggctgagatgcttgaatctggatgtgtacaggatactgctgttgatggtcggaataggcagcttgatcagggagaagaggagtgcagccgcaaaaaagaaaggagcaagtctgctatgcttggctctagcctcaacaggacttttcaaccccatgatccttgctgctggactgattgcatgtgatcccaaccgtaaacgcggatggcccgcaactgaagtgatgacagctgtcggcctaatgtttgccatcgtcggagggctggcagagcttgacattgactccatggccattccaatgactatcgcggggctcatgtttgctgctttcgtgatttctgggaaatcaacagatatgtggattgagagaacggcggacatttcctgggaaagtgatgcagaaattacaggctcgagcgaaagagttgatgtgcggcttgatgatgatggaaacttccagctcatgaatgatccaggagcaccttggaagatatggatgctcagaatggtctgtctcgcgattagtgcgtacaccccctgggcaatcttgccctcagtagttggattttggataactctccaatacacaaagagaggaggcgtgttgtgggacactccctcaccaaaggagtacaaaaagggggacacgaccaccggcgtctacaggatcatgactcgtgggctgctcggcagttatcaagcaggagcgggcgtgatggttgaaggtgttttccacaccctttggcatacaacaaaaggagccgctttgatgagcggagagggccgcctggacccatactggggcagtgtcaaggaggatcgactttgttacggaggaccctggaaattgcagcacaagtggaacgggcaggatgaggtgcagatgattgtggtggaacctggcaagaacgttaagaacgtccagacgaaaccaggggtgttcaaaacacctgaaggagaaatcggggccgtgactttggacttccccactggaacatcaggctcaccaatagtggacaaaaacggtgatgtgattgggctttatggcaatggagtcataatgcccaacggctcatacataagcgcgatagtgcagggtgaaaggatggatgagccaatcccagccggattcgaacctgagatgctgaggaaaaaacagatcactgtactggatctccatcccggcgccggtaaaacaaggaggattctgccacagatcatcaaagaggccataaacagaagactgagaacagccgtgctagcgccaaccagggttgtggctgctgagatggctgaagcactgagaggactgcccatccggtaccagacatccgcagtgcccagagaacataatggaaatgagattgttgatgtcatgtgtcatgctaccctcacccacaggctgatgtctcctcacagggtgccgaactacaacctgttcgtgatggatgaggctcatttcaccgacccagctagcattgcagcaagaggttacatttccacaaaggtcgagctaggggaggcggcggcaatattcatgacagccaccccaccaggcacttcagatccattcccagagtccaattcaccaatttccgacttacagactgagatcccggatcgagcttggaactctggatacgaatggatcacagaatacaccgggaagacggtttggtttgtgcctagtgtcaagatggggaatgagattgccctttgcctacaacgtgctggaaagaaagtagtccaattgaacagaaagtcgtacgagacggagtacccaaaatgtaagaacgatgattgggactttgttatcacaacagacatatctgaaatgggggctaacttcaaggcgagcagggtgattgacagccggaagagtgtgaaaccaaccatcataacagaaggagaagggagagtgatcctgggagaaccatctgcagtgacagcagctagtgccgcccagagacgtggacgtatcggtagaaatccgtcgcaagttggtgatgagtactgttatggggggcacacgaatgaagacgactcgaacttcgcccattggactgaggcacgaatcatgctggacaacatcaacatgccaaacggactgatcgctcaattctaccaaccagagcgtgagaaggtatataccatggatggggaataccggctcagaggagaagagagaaaaaactttctggaactgttgaggactgcagatctgccagtttggctggcttacaaggttgcagcggctggagtgtcataccacgaccggaggtggtgctttgatggtcctaggacaaacacaattttagaagacaacaacgaagtggaagtcatcacgaagcttggtgaaaggaagattctgaggccgcgctggattgatgccagggtgtactcggatcaccaggcactaaaggcgttcaaggacttcgcctcgggaaaacgttctcagatagggctcattgaggttctgggaaagatgcctgagcacttcatggggaagacatgggaagcacttgacaccatgtacgttgtggccactgcagagaaaggaggaagagctcacagaatggccctggaggaactgccagatgctcttcagacaattgccttgattgccttattgagtgtgatgaccatgggagtattcttcctcctcatgcagcggaagggcattggaaagataggtttgggaggcgctgtcttgggagtcgcgacctttttctgttggatggctgaagttccaggaacgaagatcgccggaatgttgctgctctcccttctcttgatgattgtgctaattcctgagccagagaagcaacgttcgcagacagacaaccagctagccgtgttcctgatttgtgtcatgacccttgtgagcgcagtggcagccaacgagatgggttggctagataagaccaagagtgacataagcagtttgtttgggcaaagaattgaggtcaaggagaatttcagcatgggagagtttcttctggacttgaggccggcaacagcctggtcactgtacgctgtgacaacagcggtcctcactccactgctaaagcatttgatcacgtcagattacatcaacacctcattgacctcaataaacgttcaggcaagtgcactattcacactcgcgcgaggcttccccttcgtcgatgttggagtgtcggctctcctgctagcagccggatgctggggacaagtcaccctcaccgttacggtaacagcggcaacactccttttttgccactatgcctacatggttcccggttggcaagctgagggcaatgcgctcagcccagcggcggacagcggccggaatcatgaagaacgctgtagtggatggcatcgtggccacggacgtcccagaattagagcgcaccacacccatcatgcagaagaaagttggacagatcatgctgatcttggtgtctctagctgcagtagtagtgaacccgtctgtgaagacagtacgagaagccggaattttgatcacggccgcagcggtgacgctttgggagaatggagcaagctctgtttggaacgcaacaactgccatcggactctgccacatcatgcgtgggggttggttgtcatgtctatccataacatggacactcataaagaacatggaaaaaccaggactaaaaagaggtggggcaaaaggacgcaccttgggagaggtttggaaagaaagactcaaccagatgacaaaagaagagttcactag

SEQ ID NO: 14661 - DNA, 3612 bp, unidentified
  misc_feature 1..3612: note = Synthetic
  source 1..3612: mol_type = other DNA
ctgtttcttagcacgaagatctcgatgtctaagaaaccaggagggcccggcaagagccgggctgtcaatatgctaaaacgcggaatgccccgcgtgttgtccttgattggactgaagagggctatgttgagcctgatcgacggcaaggggccaatacgatttgtgttggctctcttggcgttcttcaggttcacagcaattgctccgacccgagcagtgctggatcgatggagaggtgtgaacaaacaaacagcgatgaaacaccttctgagttttaagaaggaactagggaccttgaccagtgctatcaatcggcggagctcaaaacaaaagaaaagaggaggaaagaccggaattgcagtcatgattggcctgatcgccagcgtaggagcagttaccctctctaacttccaagggaaggtgatgatgacggtaaatgctactgacgtcacagatgtcatcacgattccaacagctgctggaaagaacctatgcattgtcagagcaatggatgtgggatacatgtgcgatgatactatcacttatgaatgcccagtactgtcggctggtaatgatccagaagacatcgactgttggtgcacaaagtcagcagtctacgtcaggtatggaagatgcaccaagacacgccactcaagacgcagtcggaggtcactgacagtgcagacacacggagaaagcactctagcgaacaagaagggggcttggatggacagcaccaaggccacaaggtatttggtaaaaacagaatcatggatcttgaggaaccctggatatgccctggtggcagccgtcattggttggatgcttgggagcaacaccatgcagagagttgtgtttgtcgtgctattgcttttggtggccccagcttacagcttcaactgccttggaatgagcaacagagacttcttggaaggagtgtctggagcaacatgggtggatttggttctcgaaggcgacagctgcgtgactatcatgtctaaggacaagcctaccatcgatgtgaagatgatgaatatggaggcggccaacctggcagaggtccgcagttattgctatttggctaccgtcagcgatctctccaccaaagctgcgtgcccgaccatgggagaagctcacaatgacaaacgtgctgacccagcttttgtgtgcagacaaggagtggtggacaggggctggggcaacggctgcggactatttggcaaaggaagcattgacacatgcgccaaatttgcctgctctaccaaggcaataggaagaaccatcttgaaagagaatatcaagtacgaagtggccatttttgtccatggaccaactactgtggagtcgcacggaaactactccacacaggttggagccactcaggcagggagactcagcatcactcctgcggcgccttcatacacactaaagcttggagaatatggagaggtgacagtggactgtgaaccacggtcagggattgacaccaatgcatactacgtgatgactgttggaacaaagacgttcttggtccatcgtgagtggttcatggacctcaacctcccttggagcagtgctggaagtactgtgtggaggaacagagagacgttaatggagtttgaggaaccacacgccacgaagcagtctgtgatagcattgggctcacaagagggagctctgcatcaagctttggctggagccattcctgtggaattttcaagcaacactgtcaagttgacgtcgggtcatttgaagtgtagagtgaagatggaaaaattgcagttgaagggaacaacctatggcgtctgttcaaaggctttcaagtttcttgggactcccgcagacacaggtcacggcactgtggtgttggaattgcagtacactggcacggatggaccttgcaaagttcctatctcgtcagtggcttcattgaacgacctaacgccagtgggcagattggtcactgtcaacccttttgtttcagtggccacggccaacgctaaggtcctgattgaattggaaccaccctttggagactcatacatagtggtgggcagaggagaacaacagatcaatcaccattggcacaagtctggaagcagcattggcaaagcctttacaaccaccctcaaaggagcgcagagactagccgctctaggagacacagcttgggactttggatcagttggaggggtgttcacctcagttgggaaggctgtccatcaagtgttcggaggagcattccgctcactgttcggaggcatgtcctggataacgcaaggattgctgggggctctcctgttgtggatgggcatcaatgctcgtgataggtccatagctctcacgtttctcgcagttggaggagttctgctcttcctctccgtgaacgtgcacgctgacactgggtgtgccatagacatcagccggcaagagctgagatgtggaagtggagtgttcatacacaatgatgtggaggcttggatggaccggtacaagtattaccctgaaacgccacaaggcctagccaagatcattcagaaagctcataaggaaggagtgtgcggtctacgatcagtttccagactggagcatcaaatgtgggaagcagtgaaggacgagctgaacactcttttgaaggagaatggtgtggaccttagtgtcgtggttgagaaacaggagggaatgtacaagtcagcacctaaacgcctcaccgccaccacggaaaaattggaaattggctggaaggcctggggaaagagtattttatttgcaccagaactcgccaacaacacctttgtggttgatggtccggagaccaaggaatgtccgactcagaatcgcgcttggaatagcttagaagtggaggattttggatttggtctcaccagcactcggatgttcctgaaggtcagagagagcaacacaactgaatgtgactcgaagatcattggaacggctgtcaagaacaacttggcgatccacagtgacctgtcctattggattgaaagcaggctcaatgatacgtggaagcttgaaagggcagttctgggtgaagtcaaatcatgtacgtggcctgagacgcataccttgtggggcgatggaatccttgagagtgacttgataataccagtcacactggcgggaccacgaagcaatcacaatcggagacctgggtacaagacacaaaaccagggcccatgggacgaaggccgggtagagattgacttcgattactgcccaggaactacggtcaccctgagtgagagctgcggacaccgtggacctgccactcgcaccaccacagagagcggaaagttgataacagattggtgctgcaggagctgcaccttaccaccactgcgctaccaaactgacagcggctgttggtatggtatggagatcagaccacagagacatgatgaaaagaccctcgtgcagtcacaagtgaatgcttataatgctgatatgattgaccctttttcagttgggccttctggtcgtgttcttggccacccaggaggtccttcgcaagaggtggacagccaagatcagcatgccagctatactgattgctctgctagtcctggtgtttgggggcattacttacactga

SEQ ID NO: 14662 - DNA, 1608 bp, unidentified
  source 1..1608: mol_type = other DNA
  misc_feature 1..1608: note = Synthetic
atggagttattggaccacgacatttataagggacccgttcgagaacgggtcacgtataccattcccaaccatccctatctctcgctgaccgttcaccattccagggaacttgatgttgatctgaaagacataacggaggagatgattatagatagcggcacgttgaccgcagaggatctgttcatgacccgcggcttacgattttgtgacgatagtgttctctgggcggctctggcggagaaagtttctgtggaattccaaaggcgtggaaagacgaccatggatctctcggctttcatgtctctcttagaacggttaacttttgaggacgaaacgtcagctttttatcgactcctgaccaagtgcaccgctctggcgcacttctcgattctggagtacatcgtcgatggggagaagagggatactatctcggcgcatttcaaccgtcttttggagttgttggactccctcttcctgcagttccttatgctgaggaacaggagtgagtccaatactctgttgaccttgttcgatattttgcccaatcccaaggagatctatggcgacgcggcgtctccgacgagtgtgctcttgaaacactttttgtccgattacatctttgtcgcgtacgcttcttcttatcgctttgtgtcttctgtgctctgtagttgcgatcagtgccgggcgtctctctttcggatctatctgggtaagaaagattcccgggccgtgaacatatctgatatttccgaattcgatccagctgatctcattttaggccagctgcacctcgacgcgcgtgaagcggtcgctctccgggcggagattgaccgagatcttggttcttctcttattcttaactctatggaaaggcggcatttgcccattcttcacgataagcagttggggagagggcatttcgaacgtaacatcttgaaggtgtactgcaacattgttctgtgtctgtttctgctgagacgcgtcaaacagcgcatcgtaagtgatctcacggccattgctcgtttcttcgtaaaagcgatctcagaaatggagcgttgcatcgataccgtttctggcctccacggtgtcaggatcaaactgttagttgtcagttctcagttcgagattaaagatcccatgcgcgtccctcggttgtgttttttctttcttgagatcgtgacgattctcgtatcgggttatgacaaggaacggcatcgcgttcgtgcgctcttggagcatctgtgcctaaaaaagatctgtctaggcgacctgtgtgcatccatgcgactcgctcgcgagataaggcacgatgttctggagggcttcctcaatactctggagttatcttacatgtcgaatccggtgaggttttttcgttttcacgactgcaatctttacgggacccatatgtggagtggggtgtatccgaacgtcgttccttacgctgtgcgcggcggcggctcgtttgacatcaggttgcaggagcaccggagacgtcaaaagcgaatagtcctcagacgtaggcttataagacgcgtgcaacagcgagggttagacattcgcgaagcgcgccgcgttcctaagctggcttgtgtgacctttatctga

SEQ ID NO: 14663 - DNA, 33 bp, unidentified; identical to SEQ ID NO: 1
  source 1..33: mol_type = other DNA
  misc_feature 1..33: note = Synthetic

SEQ ID NO: 14664 - DNA, 393 bp, unidentified
  misc_feature 1..393: note = Synthetic
  source 1..393: mol_type = other DNA
atgtatttgttacgaccggtttttatttcggtggtggttcctgagcccctgatgttttatttaaataatatggacatttctgtggtagattttttaaagacaaacatgtcggagtttttgctgcacattttgcattgtgttactccagttcttcaagctgcttattgtggctttaccttaacgtctttagctcctacgctagagatgatttgttgtgtagcatcacctgagctgcttcctgatagcgaactgacagagcttatatgcaatgatttggatgactttgtacaactaatgctacgcatggagattcgggatcggggttttgagcctaatgttaatcttttaaatgaactgcaggtgacacgggaacctgatctttttcaaccatga

SEQ ID NO: 14665 - DNA, 60 bp, unidentified; identical to SEQ ID NO: 595
  misc_feature 1..60: note = Synthetic
  source 1..60: mol_type = other DNA

SEQ ID NO: 14666 - DNA, 231 bp, unidentified
  source 1..231: mol_type = other DNA
  misc_feature 1..231: note = Synthetic
ttggacaccttttcaagagagtattcaatgaccgaatgttctccagatcttcaaaaattttcatttaaaatggcaattgcttctcttaataagcttagaggatttaaaaaaagagtaaatgtttttgaaacaaaaattgtaatggataacgatgataatgttttaggtatgctgtttagtgacagacttcaatcttttagaataaatatttttatgtcttttcaagattaa

SEQ ID NO: 14667 - DNA, 30 bp, unidentified; identical to SEQ ID NO: 2167
  misc_feature 1..30: note = Synthetic
  source 1..30: mol_type = other DNA

SEQ ID NO: 14668 - DNA, 18 bp, unidentified
  source 1..18: mol_type = other DNA
  misc_feature 1..18: note = Synthetic
atgaagcgattatattga

SEQ ID NO: 14669 - DNA, 51 bp, unidentified; identical to SEQ ID NO: 7371
  misc_feature 1..51: note = Synthetic
  source 1..51: mol_type = other DNA

SEQ ID NO: 14670 - DNA, 636 bp, unidentified
  source 1..636: mol_type = other DNA
  misc_feature 1..636: note = Synthetic
attgaatgccagattaacttaccatctgtaaaaatgaaaactggggcaaatatgtcacgaaggaatccttgcaaatttgaaattcgaggtcattgcttaaatggtaagaggtgtcattttagtcataattattttgaatggccaccccatgcactgcttgtaagacaaaactttatgttaaacagaatacttaagtctatggataaaagtatagataccttatcagaaataagtggagctgcagagttggacagaacagaagagtatgctcttggtgtagttggagtgctagagagttatataggatcaataaacaatataactaaacaatcagcatgtgttgccatgagcaaactcctcactgaactcaatagtgatgatatcaaaaagctgagggacaatgaagagctaaattcacccaagataagagtgtacaatactgtcatatcatatattgaaagcaacaggaaaaacaataaacaaactatccatctgttaaaaagattgccagcagacgtattgaagaaaaccatcaaaaacacattggatatccataagagcataaccatcaacaacccaaaagaatcaactgttagtgatacaaatgaccatgccaaaaataatgatactacctga

SEQ ID NO: 14671 - DNA, 15 bp, unidentified
  source 1..15: mol_type = other DNA
  misc_feature 1..15: note = Synthetic
atgaagaagtattga

SEQ ID NO: 14672 - DNA, 54 bp, unidentified; identical to SEQ ID NO: 7377
  source 1..54: mol_type = other DNA
  misc_feature 1..54: note = Synthetic

SEQ ID NO: 14673 - DNA, 2547 bp, unidentified
  misc_feature 1..2547: note = Synthetic
  source 1..2547: mol_type = other DNA
ataaaacacgatatggatgccaacgtagtatcatcttctactattgcgacgtatatagacgctttagcgaagaatgcttcggaattagaacagaggtctaccgcatacgaaataaataatgaattggaactagtatttattaagccgccattgattactttgacaaatgtagtgaatatctctacgattcaggaatcgtttattcgatttaccgttactaataaggaaggtgttaaaattagaactaagattccattatctaaggtacatggtctagatgtaaaaaatgtacagttagtagatgctatagataacatagtttgggaaaagaaatcattagtgacggaaaatcgtcttcacaaagaatgcttgttgagactatcgacagaggaacgtcatatatttttggattacaagaaatatggatcctctatccgactagaattagtcaatcttattcaagcaaaaacaaaaaactttacgatagactttaagctaaaatattttctaggatccggtgcccagtctaaaagttctttattacacgctattaatcatccaaagtcaaggcctaatacatctctggaaatagaatttacacctagagacaatgaaacagttccatatgatgaactaataaaggaattgacgactctctcgcgtcatatatttatggcttctccagagaatgtaattctttctccgcctattaacgcgcctataaaaacctttatgttgcctaaacaagatatagtaggtttggatctggaaaatctatatgccgtaactaagactgacggcattcctataactatcagagttacatcaaacgggttgtattgttattttacacatcttggttatattattagatatcctgttaagagaataatagattccgaagtagtagtctttggtgaggcagttaaggataagaactggaccgtatatctcattaagctaatagagcctgtgaatgcaatcaatgatagactagaagaaagtaagtatgttgaatctaaactagtggatatttgtgatcggatagtattcaagtcaaagaaatacgaaggtccgtttactacaactagtgaagtcgtcgatatgttatctacatatttaccaaagcaaccagaaggtgttattctgttctattcaaagggacctaaatctaacattgattttaaaattaaaaaggaaaatactatagaccaaactgcaaatgtagtatttaggtacatgtccagtgaaccaattatctttggagagtcgtctatctttgtagagtataagaaatttagcaacgataaaggctttcctaaagaatatggttctggtaagattgtgttatataacggcgttaattatctaaataatatctattgtttggaatatattaatacacataatgaagtgggtattaagtccgtggttgtacctattaagtttatagcagaattcttagttaatggagaaatacttaaacctagaattgataaaaccatgaaatatattaactcagaagattattatggaaatcaacataatatcatagtcgaacatttaagagatcaaagcatcaaaataggagatatctttaacgaggataaactatcggatgtgggacatcaatacgccaataatgataaatttagattaaatccagaagttagttattttacgaataaacgaactagaggaccgttgggaattttatcaaactacgtcaagactcttcttatttctatgtattgttccaaaacatttttagacgattccaacaaacgaaaggtattggcgattgattttggaaacggtgctgacctggaaaaatacttttatggagagattgcgttattggtagcgacggatccggatgctgatgctatagctagaggaaatgaaagatacaacaaattaaactctggaattaaaaccaagtactacaaatttgactacattcaggaaactattcgatccgatacatttgtctctagtgtcagagaagtattctattttggaaagtttaatatcatcgactggcagtttgctatccattattcttttcatccgagacattatgctaccgtcatgaataacttatccgaactaactgcttctggaggcaaggtattaatcactaccatggacggagacaaattatcaaaattaacagataaaaagacttttataattcataagaatttacctagtagcgaaaactatatgtctgtagaaaaaatagctgatgatagaatagtggtatataatccatcaacaatgtctactccaatgactgaatacattatcaaaaagaacgatatagtcagagtgtttaacgaatacggatttgttcttgtagataacgttgatttcgctacaattatagaacgaagtaaaaagtttattaatggcgcatctacaatggaagatagaccatctacaagaaactttttcgaactaaatagaggagccattaaatgtgaaggtttagatgtcgaagacttacttagttactatgttgtttatgtcttttctaagcggtaa

SEQ ID NO: 14674 - DNA, 522 bp, unidentified; identical to SEQ ID NO: 10624
  misc_feature 1..522: note = Synthetic
  source 1..522: mol_type = other DNA

SEQ ID NO: 14675 - DNA, 39 bp, unidentified; identical to SEQ ID NO: 7401
  misc_feature 1..39: note = Synthetic
  source 1..39: mol_type = other DNA

SEQ ID NO: 14676 - DNA, 21 bp, unidentified
  misc_feature 1..21: note = Synthetic
  source 1..21: mol_type = other DNA
atgcaaaaaggttcatgctaa

SEQ ID NO: 14677 - DNA, 21 bp, unidentified
  source 1..21: mol_type = other DNA
  misc_feature 1..21: note = Synthetic
atgcaaaaaggttcatgctaa

SEQ ID NO: 14678 - DNA, 87 bp, unidentified; identical to SEQ ID NO: 7413
  source 1..87: mol_type = other DNA
  misc_feature 1..87: note = Synthetic

SEQ ID NO: 14679 - DNA, 87 bp, unidentified; identical to SEQ ID NO: 7413
  misc_feature 1..87: note = Synthetic
  source 1..87: mol_type = other DNA

SEQ ID NO: 14680 - DNA, 39 bp, unidentified; identical to SEQ ID NO: 7401
  source 1..39: mol_type = other DNA
  misc_feature 1..39: note = Synthetic

SEQ ID NO: 14681 - DNA, 534 bp, unidentified
  misc_feature 1..534: note = Synthetic
  source 1..534: mol_type = other DNA
atgacaaaattaaaaaagataaagagttctaattccagcaaatctagtaaatcaactgataacgaatcagactgggaggatcactgtagtgctatggaacaaaataatgacgtggataatatttctaggaatgagatattggatgatgatagcttcgctggtagtttaatatgggataacgaatccaatgtcatagcgcctagcacagaacacatttacgatagtgttgctggaagcacgcggctaataaataatgattgtaatgaacaaactatttatcagaacactacagtaattaatgagacagagactattgaagtacttaatgaagataccaaacagaatcctagctattcgtccaatcctttcgtaaattataataaaaccagtatttgtagcaagtcaaatccgttcattacagaactcaacaataaatttagtgagaataatccgtttaggagagcacatagcgatgattacctaaataagcaagaacatgatgatatagaatcatctgttgtatcattagtctga

SEQ ID NO: 14682 - DNA, 549 bp, unidentified
  source 1..549: mol_type = other DNA
  misc_feature 1..549: note = Synthetic
atgacaaaattaaaaaagataaagagttctaattccagcaaatctagtaaatcaactgatagcgaatcagactgggaggatcactgtagtgctatggaacaaaacaatgacgtagataatatttctaggaatgagatattggacgatgatagcttcgctggtagtttaatatgggataacgaatccaatgtcatggcgcctagcacagaacacatttacgatagtgttgctggaagcacgctgctaataaataatgatcgtaatgaacagactatttatcagaacactacagtagtaattaatgagacggagactgttgaagtacttaatgaagataccaaacagaatcctaactattcatccaatcctttcgtaaattataataaaaccagtatttgtagcaagtcaaatccgttcattacagaactcaacaataaatttagtgagaataatccgtttagacgagcacatagcgatgattatcttaataagcaagaacaagatcatgaacacgatgatatagaatcatcggtcgtatcattggtgtga

SEQ ID NO: 14683 - DNA, 1971 bp, unidentified
  misc_feature 1..1971: note = Synthetic
  source 1..1971: mol_type = other DNA
acggatccgctgaacgcagacacaatggaacagcaaaaaggattttcgattccattttttgtcactgacgaaaactgcaactttgtgcctgaaatattacctcgtatacatactaaatttcttaaagatgtcttaattgccgattcctacaactctgttagttgggcaaacagttttattcccatgcctattcaaacgcttgaacaaattatggttcttataacaaagttcaagttttctcgctcgcgtgattttttattcccagtaattcgattagctgttcatatcaataggttccacacagggaagaaacagctgaaaaccatgatagaaattatgaaaagcttgtttaacaccgaagaggctatgcgacgattcgatgaagcattgatgattctattttctaatgagcaaaccaatacttacatgacaaacatagctttatcgatgcatgagaatggtcttccagattcaaaatttatgaatgctctaaaaatgatttacagagctggaaattcttttgataatcaaccagacaatgatatagaaagctacaacgagaaattaaaaatctacaactacctaattaaaatacctaagtacacactaaaagctggagttgatttatataatgaaaatataaaagatctttcgattggaatccaaagacaacctactttattattcacatctcgtaatgatttttcattgaaagctatttataatgacgtgttatttctagtttctgcatggaatatgatcatcaactataaaaaagaacaaagaagactctttagttggataacatttgaaataaactctttaatggagaatgttgtgcttgcagcctttcagttaccagatttaaaagaaatgacacttgatttaagcgctttgattgccaacatgaatcttttaaaaccaaatgatgattacagcccccattttaaactaattatcaacaaattttttgaaatcggaatttttgtcacgaaatcatatatttgtattttgccttcttttgtcaaaagccaactcatttcgtttgaaaacgttttaagttcaaacagacatgcggaagatgtgactttcatactaacatcttccaaggaatctgatgatgaatatgatgaagataaacctccacgacaagtagatccagacagagtggacaacattttaatggaatcagatttttttaatgtgaaaccggaaaacgccttttcagaaatcgcattaatgccaatttcacatgacaaaattatagatgtcaacaactcaaacatacaagttcttgaaactgaattggcacatacaaatttatttgtgtatagcgcaatagctcaaaaatatgatttgcctttaaaagaatacgtagagcgcttaaacgtctacaatcctgatctatcatctggaaactctacacccgcgcggaattctaattctattcgtacaactccagttctaaatatatccagaccaggaagcactacaccctctgggaactctgcaagatatgggaataacacacctagaagtataactccggttttagagatttcaagatctagaagtgctaccccttctggaaattctgaaatctatgagaatagaacatccccaacgttccgtgtttctaggagtgcaactccaatagaaagaagttcgagatctgctagtataatttctggagaatctgttcctggtttttttaatgaccaagaacgtttgagcaccaattcgcctatttccataaatggtaatactccaagacagcaaagccatggggacaatgaaatacaaactatagattccacggatgaagactcaatgaatgccccacaatcaccccaatccatctattcaatttctagctatgtttcaacagacgatcaacttctacattcaccgacaaatagcccatttaatctttttgactctgtctcggaaatgcaagaagacaccgaataa

SEQ ID NO: 14684 - DNA, 870 bp, unidentified
  source 1..870: mol_type = other DNA
  misc_feature 1..870: note = Synthetic
ctggtcctgactattttatgcagaaagagcatggaagacatcaattttacgtcgctggctccgcggcacggctcgcggccgctcatgggcacctggaacgacatcggcaccagtcagctcaacgggggcgctttcaattgggggagcctttggagcggcattaaaaactttggctccacgattaaatcctacggcagcaaagcctggaacagtagtgctggtcagatgctccgagataaactgaaggacaccaacttccaagaaaaagtggtcaatggggtggtgaccggcatccacggcgcggtagatctcgccaaccaagcggtgcagaaagagattgacaggcgtttggaaagctcgcgggtgccgccgcagagaggggatgaggtggaggtcgaggaagtagaagtagaggaaaagctgcccccgctggagaaagttcccggtgcgcctccgagaccgcagaagcgacccaggccagaactagaagaaactctggtgacggagagcaaggagcctccctcgtacgagcaagccttgaaagagggcgcctctccaccctacccaatgacaaaaccgatcgcgcctatggctcggccggtgtacgggaaggactacaagcctgtcacgctagagctccccccgccgccaccgccgccccccacgcgcccgaccgttccccccctgccggctccgtcggcgggacccgtgtccgcacccgtcgccgtgcctctgccagccgcccgcccagtggccgtggccactgccagaaaccccagaggccagagaggagccaactggcaaagcacgctgaacagcatcgtgggcctgggagtgaaaagcctgaaacgccgccgttgctattattaa

SEQ ID NO: 14685 - DNA, 15 bp, unidentified
  misc_feature 1..15: note = Synthetic
  source 1..15: mol_type = other DNA
ctgatgaaaaaataa

SEQ ID NO: 14686 - DNA, 84 bp, unidentified
  misc_feature 1..84: note = Synthetic
  source 1..84: mol_type = other DNA
atgttgccgtctaaacccgcttgcgaaagtactataaaaataatggtccatacggctcttccccaatgtttgggattcatttaa

SEQ ID NO: 14687 - DNA, 15 bp, unidentified
  misc_feature 1..15: note = Synthetic
  source 1..15: mol_type = other DNA
ctgatgaaaaaataa

SEQ ID NO: 14688 - DNA, 15 bp, unidentified
  misc_feature 1..15: note = Synthetic
  source 1..15: mol_type = other DNA
ctgatgaaaaaataa

SEQ ID NO: 14689 - DNA, 24 bp, unidentified
  misc_feature 1..24: note = Synthetic
  source 1..24: mol_type = other DNA
atgcaggacatggaagagtgctga

SEQ ID NO: 14690 - DNA, 84 bp, unidentified
  source 1..84: mol_type = other DNA
  misc_feature 1..84: note = Synthetic
atgttgccgtctaaacccgcttgcgaaagtactataaaaataatggtccatatggctcttccccaatgtttgggattcatttaa

SEQ ID NO: 14691 - DNA, 15 bp, unidentified
  source 1..15: mol_type = other DNA
  misc_feature 1..15: note = Synthetic
ctgatgaaaaaataa

SEQ ID NO: 14692 - DNA, 33 bp, unidentified; identical to SEQ ID NO: 7421
  source 1..33: mol_type = other DNA
  misc_feature 1..33: note = Synthetic

SEQ ID NO: 14693 - DNA, 21 bp, unidentified
  misc_feature 1..21: note = Synthetic
  source 1..21: mol_type = other DNA
atgttagatgtgctttgctaa

SEQ ID NO: 14694 - DNA, 27 bp, unidentified
  misc_feature 1..27: note = Synthetic
  source 1..27: mol_type = other DNA
atgcacacatttttgcggaacccctaa

SEQ ID NO: 14695 - DNA, 24 bp, unidentified
  source 1..24: mol_type = other DNA
  misc_feature 1..24: note = Synthetic
atagttattagaataagagtgtag

SEQ ID NO: 14696 - DNA, 15 bp, unidentified
  source 1..15: mol_type = other DNA
  misc_feature 1..15: note = Synthetic
aggatgatacattaa

SEQ ID NO: 14697 - DNA, 393 bp, unidentified
  source 1..393: mol_type = other DNA
  misc_feature 1..393: note = Synthetic
acggcggacatttttaacatggcatctattttaaatacacttaggtttttggaaaaaacatcattttataattgtaacgattcaataactaaagaaaagattaagattaaacataagggaatgtcatttgtattttataagccaaagcattctaccgttgttaaatacttgtctggaggaggtatatatcatgatgatttggttgtattggggaaggtaacaattaataatctaaagatgatgctattttacatggatttatcatatcatggagtgacaagtagtggagcaatttacaaattgggatcgtctatcgatagactttctctaaataggactattgttacaaaagttaataattatgatgatacattttttgacgacgatgattga

SEQ ID NO: 14698 - DNA, 441 bp, unidentified
  source 1..441: mol_type = other DNA
  misc_feature 1..441: note = Synthetic
acggcggacatttttaacatggcatctattttaaatacacttaggtttttagaaaaaacatcattttataattgcaacgattcaataactaaagaaaagattaagattaaacataagggaatgtcatttgtattttataagccaaagcattctactgttgttaaatacttgtctggaggaggtatatatcatgatgatttggttgtattggggaaggtaacaattaatgatctaaagatgatgctattttacatggatttatcatatcatggagtgacaagtagtggagcaatttacaaattgggatcgtctatcgatagactttctctaaataggactattgttacaaaagttaataattataataattataataattataataattataataattataataattataattatgacacattttttgacgatgatgattga

SEQ ID NO: 14699 - DNA, 357 bp, unidentified
  source 1..357: mol_type = other DNA
  misc_feature 1..357: note = Synthetic
ataactaaagaaaagattaagattaaacataagggaatgtcatttgtattttataagccaaagcattctaccgttgttaaatacttatctggaggatgtatatatcatgatgatttggttgtattggggaaggtaacaattaatgatctaaagatgatgctattttacatggatttatcatatcatggagtgacaagtagtggagtaatttacaaattgggatcatccatagatagactttctctaaataggactattgttacaaaagttaataacaattataacaattataacaattataacaattattataattgttataattatgatgatacattttttgacgatgatgattga

SEQ ID NO: 14700 - DNA, 363 bp, unidentified
  misc_feature 1..363: note = Synthetic
  source 1..363: mol_type = other DNA
ataactaaagaaaagattaagattaaacataagggaatgtcatttgtattttataagccaaagcattctaccgttgttaaatacttgtctggaggaggtatatatcatgatgatttggttgtattggggaaggtaacaattaatgatctaaagatgatgctattttacatggatttatcatatcatggagtgacaagtagtggagcaatttacaaattgggatcgtctatcgatagactttctctaaataggactattgttacaaaagttaataacaattataacaattataacaattataattgttataataattataattgttataattatgatgatacattttttgacgatgatgattga

SEQ ID NO: 14701 - DNA, 57 bp, unidentified; identical to SEQ ID NO: 7430
  misc_feature 1..57: note = Synthetic
  source 1..57: mol_type = other DNA

SEQ ID NO: 14702 - DNA, 2547 bp, unidentified
  source 1..2547: mol_type = other DNA
  misc_feature 1..2547: note = Synthetic
ataaaacacgatatggatgccaacgtagtatcatcttccactatcgcgacatatatagacgctttagcaaagaatgcttcggaattagaacagggttctaccgcatacgaaataaataatgaattggaactagtatttattaagccgccattgattactttgacaaatgtagtaaatatctccacgattcaggaatcgtttatccgatttaccgttactaataaggaaggcgtcaaaattagaactaagattccattatctaaggtacatggtctagatgtaaaaaatgtacagttagtagatgctatagataacatagtttgggaaaagaaatcattagtgacggaaaatcgtcttcataaagcatgcttgttgagactatcaacagaggaacgccatatatttttggattacaagaaatatggatcctctatccgactagaattagttaatcttattcaagcaaaaacaaaaaactttacgatagactttaagctaaaatattttctaggatccggtgcgcagtctaaaagttctttattgcacgctattaatcatccaaagtcaaggcctaatacatctctggaaatagaattcacacctagagacaatgaaacagttccatatgatgaactaataaaggaattgacgactttctcgcgtcatatatttatggcttctccagagaatgtaattctttctccacctattaacgcacctataaagacttttatgttgcctaaacaagatatagtaggtatggatctggaaaatctatatgccgtaactaagactgacggcattcctataactatcagagttacatcaaaggggttgtattgttattttacacatcttggttatattattagatatccagttaagagaataatagattctgaagtagtagtctttggtgaggcagttaaggataagaactggactgtatatctcattaagctaatagagcccgtaaatgcaatcagtgatagactagaagaaagtaagtatgtcgaatctaaactagtggatatttgtgatcggatagtattcaagtcaaagaaatacgaaggtccttttactacaactagtgaagtcgttgatatgttatctacatatttaccaaagcaaccagaaggtgttattttgttttattcaaagggacctaaatctaacattgattttaaaatcaaaaaggagaatactatagaccaaactgtaaatgtagtatttaggtacatgtccagtgaaccaattatctttggagaatcatctatctttatagagtataagaaatttaccaacgataaaggctttcctaaagaatatggttctggtaaaattgtgttatacaacggcgttaattatctaaataatatctattgtttggaatatattaatacacataatgaagtgggtattaagtccgtggttgtacctattaagtttatagcagaattcttagtcaatggagaaatacttaaacctagaatcgataaaaccatgaaatatattaactcagaagactattatggaaatcaacataatgtcatagttgaacatttaagagatcaaagcatcaaaataggagatgtctttaacgaggacaaactatctgatgtaggacatcaatatgccaataatgataaatttagattaaatccagaagttagttattttacgaataaaagaactagaggaccgttgggaattttatcgaactacgtcaagactcttcttatttctatgtattgttccaaaacatttttagacgattccaacaaacgaaaggtattggcgattgattttgaaaacggtgctgacctggaaaaatacttttatggagagattgcgttattggtagcgacggatccagatgctgatgctatagctagaggaaatgaaagatacaacaaattaaattctggaattaaaaccaagtactacaaatttgactacattcaggaaactattcgatccaatacatttgtatctagtgtcagagaagtattttattttggaaagtttaatatcatcgactggcagtttgctatccattattctttccatccgagacattatgctaccatcatgaataacttatccgaactaactgcttctggaggcaaggtattaattactaccatggacggagacaaattatcaaaattaaccgataaaaagacttttataattcataagaatctacctagtagcgaaaactatatgtctgtagaaaaaatagctgatgatagaatagtggtatataatccatcaacaatgtctactccaatgactgaatacattatcaaaaagaacgatatagttagagtgtttaacgaatacggatttgttcttgtagataatgttgatttcgctacaattatagaacgaagtaaaaagtttattaatggtgcatctacaatggaagatagaccgtctacaagaaactttttcgaactaaatagaggagccattaaatgtgaaggtttagatgtcgaagacttacttagttactatgttgtttatgtcttttctaagcggtaa

SEQ ID NO: 14703 - DNA, 831 bp, unidentified
  misc_feature 1..831: note = Synthetic
  source 1..831: mol_type = other DNA
atggctaacgtactcaaagaaaagatgtacgatgaactactgagtgcgacctgtcgtatcttaaagttggggtctcatgactataggatgactgagcggaatttattgtcgaaaaatccgaaatttcctttgtgtgatattattctcaagttagactacgcttataatctagaatatctgttgagtctctgggaacatgtaactaagcaggaaccgagatttgtgttcaaaaacacaggcggagctgtgtcgatgtcttgctatttgcatgccccggttaaagcagaaggccatcatgctgtgagagaatgcaacattctgcgtgttaatgaatgtttgactgttcgcatgagcgacatagtggctatgaagccttcaacttttgcagtgttcacgaaatgtataattaggcgtaatcgagacgaaacttacgttgtggagtttgtggcgtttgggcctgaaaacgaatctgaatacatttcgcttttgaaggcaattttcttaaagaagtgttctatggggaaacagcatctcgaatcgaataggttttgtcaaggtttgcgaagaaggtcttcacatgttttggaaaaggggcaactcggaagtagcggagaaattgcaaataaagcttctgcggttgtgacatcacaggagagtataaaccagttctatgaaaaagaaaagtcattcctgtccggtgtgaagttttcgagactaagtgaaaggcattgtcgggttgcgattgtcagcatctgctttcttttagccttgtatttttgttatgttctacttaaaaaaactcctacgccagcttctggccccgttgtgtaa

SEQ ID NO: 14704 - DNA, 45 bp, unidentified; identical to SEQ ID NO: 7438
  misc_feature 1..45: note = Synthetic
  source 1..45: mol_type = other DNA

SEQ ID NO: 14705 - DNA, 153 bp, unidentified
  source 1..153: mol_type = other DNA
  misc_feature 1..153: note = Synthetic
aaggccactgaaattaaaacagaattacagaaaattaaaacggttttcaccatgattaaccaaatcaattcccttacacaagaaaaaacgtttttcattgtggctgatgtttctgctgacaataggctggcaacttgtatatttaaagagtga

SEQ ID NO: 14706 - DNA, 30 bp, unidentified; identical to SEQ ID NO: 7440
  source 1..30: mol_type = other DNA
  misc_feature 1..30: note = Synthetic

SEQ ID NO: 14707 - DNA, 1890 bp, unidentified
  misc_feature 1..1890: note = Synthetic
  source 1..1890: mol_type = other DNA
ttgtacaaattcattgtggtcaactcacccgacatgcttcacatctcgcgactcggcctttttctgggccttttcgcgatagtcatgcactccgttaatctaataaaatacacgtctgatcccttagaagctttcaaaaccgtcaaccgccacaattggagcgacgaacaaagagaacatttttacgacctccgaaacttatatacaagtttttgtcagacaaatctatccctcgactgcttcactcaaattttaactaacgttttctcttgggacattcgagattcacaatgcaagtctgcggttagcttgtctccattacagaatttaccgcggacagaaatcaaaatagtgctatcctcgacgactgcaaacaaatctatcatcgctagcagtttttctctattttatcttctgtttgccacactatctacatataccgcagatccgccatgcgtagagttactaccatttaaaattctgggagcacagttatttgacataaaactaaccgaagaatccttgcggatggcaatgagcaaattttccaactcgaatctgacacggtcattgacttccttcacgtcaaaaaacttctttaattacaccagctttgtttacttcttgctctataacacaacatcatgcgtcccttcaaatgatcaatatttcaaacagtcgccaaaacctataaatgttaccacttcctttggacgagccatcgtaaactttgattcgatactaactactacaccatcatcgacgtcagcgtctctcacatcaccacatatccctagtaccaacataccaaccccagcacctccccccgtaacaaaaaactctacaaaactgcatacagacaccataaaagttacaccgaacacacccactataacaacgcaaacaacggaaagcatcaaaaaaatagttaaacgttcagattttcctcgacccatgtacaccccaaccgacattccaactcttacaatccgtcttaacgccactattaaaaccgaacaaaacaccgaaaacccaaaaagtccaccaaaaccaacaaattttgaaaataccacaatcagaattcccaaaacccttgagagcgctacagcaacaacaaacgcaacccaaaagatcgaaagcaccaccttcacaacaataggaatcaaggaaattaacggcaatacctattcttcaccaaaaaactctatttatcttaagagcaaatcacagcagagtacaacaaaattcaccgacgccgaacacaccactccgattttaaagtttaccacttggcaaaacacggtacgcacatacatgagtcacaacacagaagtacaaaacatgaccgacaaattccagaggacaaccttgaaatcctcaaacgagctacctaccattcagacgttgtctgtcactccaaaacaaaaactaccgtcgaatgtaactgccaaaactgaagtacacataactaacaacgctttaccatctagtaattcatcatactcaatcactgaagtcactaaagaggtaaagcatactagaatgtcagcgtccactcacgaacagataaaccacacagaaatagcacaaataacaccaattcttaacgctcacacatcggaaaaatcaactacacctcaacggtccttcaccgctgaaacgttcttaacgacatcttcaaagcctaacatcataacctggtcaaacttactaacaacaacgcctaaggaaccattaacgaatacaagtctaaggtggacagatcatatcacaacacagctaacgactagcaatagaactcaatcagccaaactaacaaaagctaacatctcgtcacaaacgactaacatctacccccaaacaatcacgggacgatctacagaggtttaa

SEQ ID NO: 14708 - DNA, 1905 bp, unidentified
  misc_feature 1..1905: note = Synthetic
  source 1..1905: mol_type = other DNA
atgttaaacaggatacaaaccttgatgaaaacagctaacaattatgaaactattgagatattgcgtaattatttaagactgtatatcattttggcacgaaatgaagaaggtcgtggtatactaatatacgatgataacatagatagtgttatgtcgatgatgaatattacacgattagaagttataggattgactcattgcacaaaattaagatcatcgcctccaattcctatgtgtagattgtttatggacgaaatagatcatgagtcatattattctccaaaaacttcagattatccattgatcgatattatacgaaagcgttcccacgaacagggagatatagcactggctttagaacgatacggtatcgagaatacagattccatatcagaaattaatgaatggctgtcgtcaaaaggtttagcatgttatagatttgtaaaatttaacgattacaggaaacagatgtatcgtaagttctctaggtatactatagttgacagtatgataatagggcatataggtcatcattatatttggattaagaatttagaaacatatacgcgtcccgagattgatgtgttaccgttcgatattaaatacatatctagagatgaattgtgggcgcgaatttcttcctcgttagatcaaacacatataaaaaccatcgccgtatcagtttatggagctattactgataatggaccaataccatatatgatatccacgtacccgggtaatacctttgttaactttaacagtgtaaaagatctaattttagatttcttagattggattaaagatattatgactagtacacgaactatcattctagtaggttacatgagtaatctatttgatataccgttgctaacagtatactggcccaataactgtggatggaaaatctataataatacactaatatcatcagatggtgctagagttatttggatggatgcgtataaattttcttgcggcttatctttacaagactattgttatcattggggtagtaaatcagagagccgaccattcgatttaataaaaaaatcagatgctaaacgcaatattaaatcattggtcaaagaatctatggcatccttgaaatccttgtttgaggcattcgagacacaatcaggagcgctagaagttttaatgagtccgtgtaggatgttttcattttctagaatagaagacatgttcttaactagtgtcatcaatagagtatccgagaatactggaatggggatgtattatcctaccaacgatatatcttctctatttatcgaatcatctatctgtctagattatattatagtgaataatcaggaatccaacaaatatcgtatcaaatctgttctcgatatcatttcttcaaaacaatatcctgcaggacgtcccaactacgttaaaaatggtacaaaaggaaagttatatatcgcgttgtgtaaagtcaccgtacctactaacgaccatattcccgtagtttatcacgatgatgacaatactaccacctttattacagtattgacgtccgtcgatattgaaactgctatcagagcaggatattcgatagtcgaattaggggctttacaatgggatgataatattccagaacttaaagactgtttactggatagtatcaagatgatttatgacttgaacgcagccacaacaaataatttattggaacagctcatagaaaatattaactttaacaactctagtataatttcgttgttctatacatttgccattagttattgcagagcattcatttactcaatcatggaaaccatagatcaaatgtatatatctcagttcagttataaagaattgtacattagtagctcgtataaagatattaatgaatccatgagtcagatggtaaaattataa

SEQ ID NO: 14709 - DNA, 24 bp, unidentified
  misc_feature 1..24: note = Synthetic
  source 1..24: mol_type = other DNA
atgaagaaggtcgtggtatactaa

SEQ ID NO: 14710 - DNA, 54 bp, unidentified; identical to SEQ ID NO: 7444
  misc_feature 1..54: note = Synthetic
  source 1..54: mol_type = other DNA

SEQ ID NO: 14711 - DNA, 273 bp, unidentified
  misc_feature 1..273: note = Synthetic
  source 1..273: mol_type = other DNA
atggatacagacacagacgaatacacggatacggatacggatacggatacggattcagatacaaatactgcaaatgtagaagatatcatgaatgaaatagatagagagaaagaagaaatactaaaaaatgtagaaatggaaaataataaaaacattaaaaagaatcatcctagtgaatatattagagaggcactcgttattaataccagtagtgatagtgattccattgataaagaagttatagaatgtattagtcagaatgtaggaatatag

SEQ ID NO: 14712 - DNA, 12 bp, unidentified
  source 1..12: mol_type = other DNA
  misc_feature 1..12: note = Synthetic
gtggcagaatag

SEQ ID NO: 14713 - DNA, 666 bp, unidentified
  misc_feature 1..666: note = Synthetic
  source 1..666: mol_type = other DNA
atggccaggttcatcgctcagctcctcctgttggcctcctgcgtggccgccggccaggctgtcaccgctttcttgggtgagcgagtcaccctgacctcctactggaggagggtgagcctcggtccagagattgaggtcagctggtttaaactgggcccaggagaggagcaggtgcttattgggcgcatgcaccacgatgtcatctttatagagtggcctttcaggggcttctttgatatccacagaagtgccaacaccttctttttagtagtcaccgctgccaacatctcccatgacggcaactacctgtgccgcatgaaactgggcgagaccgaggtcaccaagcaggaacacctgagcgtggtgaagcctctaacgctgtctgtccactccgaaaggtctcagttcccagacttctctgtccttactgtgacatgcaccgtgaatgcatttccccatccccacgtccagtggctcatgcccgagggcgtggagcccgcaccaactgcggcaaatggcggtgttatgaaggaaaaggatgggagcctctctgttgctgttgacctgtcacttcccaagccctggcacctgccagtgacctgcgttgggaaaaatgacaaggaggaagcccacggggtttatgtttctggatacttgtcgcaataa

SEQ ID NO: 14714 - DNA, 2328 bp, unidentified
  misc_feature 1..2328: note = Synthetic
  source 1..2328: mol_type = other DNA
atctttgttcttaagactataggtgtcccgtcagtatgcagacaaaatgaagatccaagatttgtagaagcatttaaatgcgacgagttagaaagatatattaagaataatccagaatgtacactattcgaaagtcttagggatgaggaagcatattctatagtcagaattttcatggatgtagatttagacgcgtgtctagacgaaatagattatttaacagctattcaagattttattatcgaggtgtcaaactgtgtagctagattcgcgtttacagaatgcggtgccattcatgaaaatgtaataaaatccatgagatctaatttttcattaactaagtctacaaatagagataaaacaagttttcatatcatctttttagatacgtataccactatggataccttgatagccatgaaacgaacactattagaattaagtagatcatctgaaaatccactaacaagatcgatagacactgccgtatataggaaaaaaacaactcttcgggttgtaggtactaggaaaaatccaaattgcgacactattcatgtaatgcaaccaccgcatgataatatagaagattacctattcacttacgtggatatgaacaacaatagttattacttttctctacaacgacgattggaggatttagttcctgataagttatgggaaccagggtttatttcattcgaagacgctataaaaagagtttcaaaaatattcattaattctataataaactttaatgatctcgatgaaaataattttacgacggtaccactggtcatagattacgtaacaccttgtgcattatgtaaaaaacgatcgcataaacatccgcatcaactatcgttggaaaatgatgctattagaatttacaaaactggtaatccacatagttgtaaagttaaaattgttccgttggatggtaataaactgtttaatatcgcacaaagaattttagacactaactctgttttattaaccgaacgaggagaccatatagtttggattaataattcatggaaatttaacagcgaagaacccttaataacaaaactaattctgtcaataagacatcaactacctaaggaatattcaagcgaattactctgtccgaggaaacgaaagactgtagaagctaacatacgagacatgttagtagattcagtagagaccgatacctatccggataaacttccgtttaaaaatggtgtattggacctggtagacggaatgttttactctggagatgatgctaaaaaatatacgtgtactgtatcaaccggatttaaatttgacgatacaaagttcgtcgaagatagtccagaaatggaagagttaataaatatcattaacgatatccaaccattaacggatgaaaataagaaaaatagagagttgtacgaaaaaactttatctagttgtttatgcggtgctaccaaaggatgtttaacattcttttttggagaaacggcaactggaaagtcgacaaccaaacgtttgttaaagtctgctatcagtgatctgtttgttgagacgggtcaaacaattttaacagatgtattggataaaggacctaatccatttatcgctaacatgcatttgaaaagatctgtgttctgtagcgaactacctgattttgcatgtagtgggacaaagaaaatcagatctgataatattaaaaagttgacagaaccttgtgtcattggaagaccgtgtttctccaataaaattaataatagaaaccatgctacaatcattatcgatactaattacaaacctgtctttgataggatagataacgcattaatgagaagaatcgccgttgtgcgattcagaacacacttttctcaaccttctggtagagaggctgctgaaaataatgacgcgtacgataaagtcaaactattagacgaggggttagatggtaaaatacaaaataatagatatagattcgcatttctatacttgttggtgaaatggtacagaaaatatcatgttcctattatgaaactatatcctacaccggaagagattcctgactttgcattctatctcaaaataggtactctgttagtatctagctctgtaaagcatattccattaatgacggacctctccaaaaagggatatatattgcacgataatgtggttactcttccgttgactactttccaacagaaaatatccaagtattttaattctagactatttggacacgacatagagagcttcatcaatagacataagaaatttgccaatgttagtgatgaatatctacaatatatattcatagaggatatttcatctccgtaa

SEQ ID NO: 14715 - DNA, 1014 bp, unidentified
  source 1..1014: mol_type = other DNA
  misc_feature 1..1014: note = Synthetic
aagtttatgcaggtgtatgaatatgacagagagcaatatcttgatgagttcatcgaagacagatataacgatagttttatcgctagtccagaatactatagcgcggaaaaatatatgtgtagatatactatactaaatcacaattgtgtaaacgtacgacgatgcgcgttagattccaagttattacatgatatcataaccaattgtaaaatatataacaatatagaattagttagggcgacaaaatttgtttattatctggatctgataaaatgtaattgggtatctaaggtaggtgattcagttctatatccagttatatttataacacatacaagcactagaaatttagataaagtctctgtaaaaacatacaagggcgttaaagtaaaaaaacttaatagatgcgcagatcatgctattgtaattaatccattcgtcaagtttaaactaacgttaccgaacaaaacaagccatgcaaaggtattggttacattttgcaagttaagaacggatataatgccaatagaagcaccgtatccgggcaatgttttagtttatacatttcctgatattcataaaagaattcctggatatatacatattaacatagaaggatgtatcgatggaataatttatataaattcttcaaagttctcgtgtgttttaaaactacatagatcaatgtatcgcattccaccctttcctatagatatctgctcttgttgttcacaatatactaacgatgacatagaaattcccatccatgatttaataaaggatgtggtaatttttaaaaataaggagatggtatattatctaaaattaaataataaaactatagctagatttacgtactttaataatatagataccgcaattacacaagaacacaagtatgtcaaaatagcactaggtatagtctgcaagttaatgattaataatatgcatagtatcgtgggagttaatcatagtaatacgttcgtcaattgcttgttggaagataatgtataa

SEQ ID NO: 14716 - DNA, 21 bp, unidentified
  misc_feature 1..21: note = Synthetic
  source 1..21: mol_type = other DNA
atgttctcgcctaagagataa

SEQ ID NO: 14717 - DNA, 27 bp, unidentified
  misc_feature 1..27: note = Synthetic
  source 1..27: mol_type = other DNA
atgatgttgcccaagatcctctcttaa

SEQ ID NO: 14718 - DNA, 30 bp, unidentified; identical to SEQ ID NO: 7457
  source 1..30: mol_type = other DNA
  misc_feature 1..30: note = Synthetic

SEQ ID NO: 14719 - DNA, 60 bp, unidentified; identical to SEQ ID NO: 7458
  source 1..60: mol_type = other DNA
  misc_feature 1..60: note = Synthetic

SEQ ID NO: 14720 - DNA, 21 bp, unidentified
  misc_feature 1..21: note = Synthetic
  source 1..21: mol_type = other DNA
ttggcgcatttgttggattga

SEQ ID NO: 14721 - DNA, 42 bp, unidentified; identical to SEQ ID NO: 7461
  misc_feature 1..42: note = Synthetic
  source 1..42: mol_type = other DNA

SEQ ID NO: 14722 - DNA, 21 bp, unidentified
  misc_feature 1..21: note = Synthetic
  source 1..21: mol_type = other DNA
ttggcgcatttgttggattga

SEQ ID NO: 14723 - DNA, 36 bp, unidentified; identical to SEQ ID NO: 7462
  misc_feature 1..36: note = Synthetic
  source 1..36: mol_type = other DNA

SEQ ID NO: 14724 - DNA, 42 bp, unidentified; identical to SEQ ID NO: 7463
  source 1..42: mol_type = other DNA
  misc_feature 1..42: note = Synthetic

SEQ ID NO: 14725 - DNA, 102 bp, unidentified
  misc_feature 1..102: note = Synthetic
  source 1..102: mol_type = other DNA
atgccaattttctcgagaaatcattcaattgaccatagactgaaagcgttgttacctagttcttcagaagagatcttattagaattaatttatatgatctaa

SEQ ID NO: 14726 - DNA, 15 bp, unidentified
  source 1..15: mol_type = other DNA
  misc_feature 1..15: note = Synthetic
atgctacccacatga

SEQ ID NO: 14727 - DNA, 321 bp, unidentified
  source 1..321: mol_type = other DNA
  misc_feature 1..321: note = Synthetic
atggcgcacgctaaaaaacgggtacgacgaaaacttttaacttcgacagacgaccccatattgtccaacacttttaccatgcgcccgacaagtaagattgcagacgctgaaatcatttcaagagaacatgattatatcgcaagcaaaacacagacggattcaaaaaaaatatcgcccctgtctgtgattttagacaaaactgtcctctttgaattttacggtataggagacaacaacgaaaaagctatcgtctaccctatcgatccagatttcttattatgtgactcggaacataattgcaccctatcacctttcttataa

SEQ ID NO: 14728 - DNA, 831 bp, unidentified
  source 1..831: mol_type = other DNA
  misc_feature 1..831: note = Synthetic
atggctaacgtactcaaagaaaagatgtacgatgaactactgagtgcgacctgtcgtatcttaaagttggggtctcatgactataggataactgagcggaatctattgtcgaagaacccgaagtttcctttgtgtgatatcattctcaagttagactacgcttataatctagaatatctgctaagtctttgggaacatgtaactaagcaggaacccagatttgtgttcaagaacacaggtggagctgtgtcgatgtcttgctatttgcatgccccggttaaagtagaaggtcatcatgctgtgagagaatgcaacatcctgcgtgttaatgaatgtttgactgtccgcatgagcgacatagtggctatgaagccttcaacttttgcagtgttcacgaaatgtataatcaggcgtaatcgagacgacacttacgttgttgagtttgtggcgttcggacctgaaaacgaatctgaatacatttcgcttttgaaggcaattttcttaaagaagtgttctatggggaaacagcatctcgaatcaaataggttttgtcaaggtttgagaagaaggtcttcacatgttttggaaaaggggcgattcgaaagtagcgggaaagttgtaaataaagcttctgcggttgtgacatcacaggagagtataaagcagttctatgaaaaagagaagtcattactgtccggtgtgaagttttggagactaagtgaaagacattgtcggtttgcgcttgtcggcatctgttttcttttagccttgtatttttgttatgttctacttaaaaaaactcctacgccagcttctggctccgttgtgtaa

SEQ ID NO: 14729 - DNA, 1467 bp, unidentified
  source 1..1467: mol_type = other DNA
  misc_feature 1..1467: note = Synthetic
atgtctccagtctacgtgaatctgttaggtagcgtgggcctgctggccttttggtactttagctaccgctggatccagcgaaaacgccttgaagatcctctcccgccttggttaagaaagaaaaaagcatgtgcgctcacccggcgttctcggcaccggttacgccgccaacatggcgtaattgacggtgagaactcggagaccgagcggtccgtggacttggtggccgcgctcttggccgaggccggggaggagagcgtaacggaggacacagagcgggaggacacggaggaggaaagggaggatgaagaagaagaaaacgaggctcggacgcccgaggtgaaccccatggacgccgagggcctctcaggacttgcgcgagaagcctgcgaggctctcaaaaaggccctgcggaggcaccggttcctgtggcaacggcggcgacgagctcggctgctgcagcacaacggcccccagcagtctcaccatgccgcggttttttgtcgcgtccacgggctgcgcgggtttcaggtgtctgtgtggctgttgttgacgctgttttggagcacgggatacggtgtttctgttcgatgtacgtaccacggtacggacattaacgtcacttccaacgccacgagtatgaactgccggttaaactgcacgtgcaatcatacgcaaatctacaacggcccctgcgccggagccgaatccaaactgcccttgaacgtaacgtttcggcaatcacgtcggcagtggcacagcgtcatgctcacgtttggttttcagtaccacctggaaggctggtttcccctgcgcatcctgaacgagagccgcgatatcaacgtcaccgaggtctacggggaggttgcgtgttttacaaatgacactaacattaccatgggacagctgacgcttaaccttaccggccgcagttacgtattacgggcactggcgcgcacgagtccgtttgagtcatccgtaaattgggaggaaaccaacgtcaccgacaacgcgacgtcttcggaaaacaacaccgtcaccgtgatgtcagtcttaacggtatatgcggaaagtgattacatttttctacaagacatgtgtccgcggtttcttaagaggagcgttaagcttgcgaaaaacaacagaagaaacacaacttttacgggaactaacgtgacgtcgcttcccgagtggacactacaacaatgccaggggtggaaatattggactacgttatccatcatgtggaaaaaccgccgttcggctctgctccgagccaaaagtcgcgcgttgggacactgggcgttgttgagcatatgtactgtggcggcgggcagcatcgcgttgctcagcctcttctgcatcctcctcatcggacttcgtcgcgatttgcttgaagatttccgctacatttgtcgggacgagggaagttccagcacaaaaaacgacgttcattggatcgtctga

SEQ ID NO: 14730 - DNA, 78 bp, unidentified
  source 1..78: mol_type = other DNA
  misc_feature 1..78: note = Synthetic
ttggttaagaaagaaaaaagcatgtgcgctcacccggcgttctcggcaccggttacgccgccaacatggcgtaattga

SEQ ID NO: 14731 - DNA, 909 bp, unidentified
  source 1..909: mol_type = other DNA
  misc_feature 1..909: note = Synthetic
atattgactcaaattgtaaatttgtacaatccatttcgcttgcgaacaatggaaatgcttcaaaaaaggaaacatcagacaattgatgaaacttccttaaataatctcattgaaaatgagaaaaaaaagatcagaagtttgctagcttttggtgttcccaaagagtgtgtgctttcgcgaagttttactccttgcgaacttttaggacctgaacgagaccatttaggaatgcttatgttcagacttgaaacagacgcggagagtccaaaatttttgttgattagtgtattgtttttagccatgaatgccttcaatgtgtctttctgcacgaggacttctttagctaatctgtataaaacttcattagttgacagtatcaacacaatgttagatagttgttcttacttagaagaaaaggtgtctttgtttggagtaactaattatatctctcaagggactaattgtctaatatcctgtgtaatgcaaggtcatgtatatgacgtaagaaaggaaaatatatatggattggtcatattgaaagatttattattggaacctgactgggaaccaagacaaaatgcaattcagtacatttacctctgttatatctataggcaagcatttaataaaatagaatacgggatctacattgttttatctgagctgacacatgaagaagtattgatagatttattaagaaacaagttttccaaagaacgatttatgtttatgaactatttgatcaacggtgatggaaatctaaactattttggaagccttcaacgaattggtcattgtaaaacccaaaacataaaatcaggaattttagacttacagggtatctcattaaccattataagactcaaagacgtctttgtcgaattgtgtgaaagaaaaattttcttgtga

SEQ ID NO: 14732 - DNA, 66 bp, unidentified
  source 1..66: mol_type = other DNA
  misc_feature 1..66: note = Synthetic
atgacttctgattcaaaaagtatcgaaaacaaacatcagagaagactagttaaactactgctgtga

SEQ ID NO: 14733 - DNA, 81 bp, unidentified
  misc_feature 1..81: note = Synthetic
  source 1..81: mol_type = other DNA
ttgctttattctagtatgacttctgattcaaaaagtatcgaaaacaaacatcagagaagactagttaaactactgctgtga

SEQ ID NO: 14734 - DNA, 45 bp, unidentified; identical to SEQ ID NO: 7482
  source 1..45: mol_type = other DNA
  misc_feature 1..45: note = Synthetic

SEQ ID NO: 14735 - DNA, 12 bp, unidentified
  misc_feature 1..12: note = Synthetic
  source 1..12: mol_type = other DNA
gtggcagaatag

SEQ ID NO: 14736 - DNA, 12 bp, unidentified
  misc_feature 1..12: note = Synthetic
  source 1..12: mol_type = other DNA
gtggcagaatag

SEQ ID NO: 14737 - DNA, 666 bp, unidentified
  misc_feature 1..666: note = Synthetic
  source 1..666: mol_type = other DNA
atggccaggttcatcgctcagctcctcctgttggcctcctgtgtggccgccggccaggctgtcaccgctttcttgggtgagcgagtcaccctgacctcctactggaggagggtgagcctcggtccagagattgaggtcagctggtttaaactgggcccaggagaggagcaggtgcttattgggcgcatgcaccacgatgtcatctttatagagtggcctttcaggggcttctttgatatccacagaagtgccaacaccttctttttagtagtcaccgctgccaacatctcccatgacggcaactacctgtgccgcatgaaactgggcgagaccgaggtcaccaagcaggaacacctgagcgtggtgaagcctctaacgctgtctgtccactccgaaaggtctcagttcccagacttctctgtccttactgtgacatgcaccgtgaatgcatttccccatccccacgtccagtggctcatgcccgagggcgtggagcccgcaccaactgcggcaaatggcggtgttatgaaggaaaaggatgggagcctctctgttgctgttgacctgtcacttcccaagccctggcacctgccagtgacctgcgttgggaaaaatgacaaggaggaagcccacggggtttatgtttctggatacttgtcgcaataa

SEQ ID NO: 14738 - DNA, 666 bp, unidentified; identical to SEQ ID NO: 14737
  source 1..666: mol_type = other DNA
  misc_feature 1..666: note = Synthetic

SEQ ID NO: 14739 - DNA, 978 bp, unidentified
  source 1..978: mol_type = other DNA
  misc_feature 1..978: note = Synthetic
atcgcaattatggcttatggttctcgctaccgaggttatcggcgtcgccgacgcatgttctctcgttcgcgtgccagacgtggtaatggtcgtcggtattcccgcgctccgcggagacgtgtgtatcggcgacgccgaacacgtcgatcagtcctgaatgtttccactcggaaattgaaggatactatgccccctgtcgttattacggaaggtggctttgcaggcacccctggtgtcccctatcgaatgactggtcagctggagtatacgtttgcgttctgtccctcggctcgtgactctcaccgcactacggcaactgacttccctgtgggtcagcggggtatgtatcagaggtcgttgactgacgtctacgcccgtggatacaaggaaattgtctcgcttgcgtcgaatagtggagcgaactggctatggagaaggctggttgtcagcctgaagaatccaatttggaagctcttccctagtttgactgtacagcgcgaaattcctcttgacagtgaccgggcatccggtcaggtccgaacgatgtacaacatcggtcctacccctgaaggtgagacccaattggcgcaggatgtatatcgcgtcattttcgagggaacgcttgatcttgactggcataatgtgtttaatgccaaaccggataagaggtttgtccgggtacgatcggaccgcacaatgagattgcgtactacgaatgatgaggcctatctcaacaactatcagttttgggatggtgtcaatgcgaacatgcattataacgaaaaagagtcggggtctgatatcaaaatggacccggatttggagtccaatgaaaatactctgtcgaagttttcagcggaaggtctgtcgggtgctggagatttgtgggtgtttgacttcttctcctgcggcagcaaagacgctgcggatgagcttaggtttcagcctaatgggactttcttttggcacgaaagatag

SEQ ID NO: 14740 - DNA, 12 bp, unidentified
  misc_feature 1..12: note = Synthetic
  source 1..12: mol_type = other DNA
atggatttttga

SEQ ID NO: 14741 - DNA, 246 bp, unidentified
  source 1..246: mol_type = other DNA
  misc_feature 1..246: note = Synthetic
atggatataaagaatttgctgactgcatgtactattttttacattactacattggctacggcagatatacctactccgccaccaacgggtcatgtgacaagggagaatatcttgataagaggcataatcaatgttgtaatcggtgtccacctggagaatttgccaaggttagatgtaatggtaacgataacacaaaatgtgaacgctgcccacctcatacatataccacaatcccaattattctaa

SEQ ID NO: 14742 - DNA, 273 bp, unidentified
  misc_feature 1..273: note = Synthetic
  source 1..273: mol_type = other DNA
atggtagctgcatttctacttctcctctgtctacccatcattttcgtctcttcaactttcgccgcagtttcccacctggaaccagagtgcctaccgccttttgacgtgtatctgattctcacctttgtttgttgtatatccatttgcagtatagcctgcttttttataacaatctttcaagccgccgactatttttacgtgcgaattgcttactttagacaccatcctgaatacagaaatcaaaacgttgcctccttactttgtttggcatga

SEQ ID NO: 14743 - DNA, 45 bp, unidentified; identical to SEQ ID NO: 7490
  source 1..45: mol_type = other DNA
  misc_feature 1..45: note = Synthetic

SEQ ID NO: 14744 - DNA, 63 bp, unidentified
  source 1..63: mol_type = other DNA
  misc_feature 1..63: note = Synthetic
ttggatcatgtgtactcaaccggccatacattaaggatgactatacagcacatgttgcaatga

SEQ ID NO: 14745 - DNA, 735 bp, unidentified
  misc_feature 1..735: note = Synthetic
  source 1..735: mol_type = other DNA
atgggtaacaaaaatattaaaccatctaaggaaaatagactgtccatcttgtacaaggataggatggattcatttaagagaggatcttgggcaacatcatcatttagagaaaagtcacatgcaaccatccaaagatttttatctcttaggcgagaacatgttaaagtggaccatcctgacaagttcctggagttaaagagagagatatatgcaataattcagaaatcatcgtctatagatgtggacaaacggactaagcttatgtccaacataaaaacgatgatgataaatccattcatgatcgagggtttaatgacgtctttagaaagcttggatcctgataacaagatgagctactcatcagtgatgatattgggagaattcgacatcatcaatataagcgacaataaggcggcattcgagttcataaacagtctgttgaaatctcttctcttgttaaatactagccaattaaaactcttggaatactctattagtaatgacttgttgtatacccacataaatgcgttggaatatatcataaaaaatacatttaatgttccagaacggcaactgattctgagatgtcaatacctaactccaattttcagtgatttgttaaagtatgcgggtctaaccataaagtcaaacatactcatgtggaataaaaagtttatcaaaccagtatctgacctatatacatctatgcaactacttcattgtgttacagtataa

SEQ ID NO: 14746 - DNA, 1686 bp, unidentified
  misc_feature 1..1686: note = Synthetic
  source 1..1686: mol_type = other DNA
atggagtcgcgcggtcgccgttgtcccgaaatgatatccgtactgggtcccatttcggggcacgtgctgaaagccgtgtttagtcgcggcgatacgccggtgctgccgcacgagacgcgactcctgcagacgggtatccacgtacgcgtgagccagccctcgctgatcctggtgtcgcagtacacgcccgactcgacgccatgccaccgcggcgacaatcagctgcaggtgcagcacacgtactttacgggcagcgaggtggagaacgtgtcggtcaacgtgcacaaccccacgggccgaagcatctgccccagccaagagcccatgtcgatctatgtgtacgcgctgccgctcaagatgctgaacatccccagcatcaacgtgcaccactacccgtcggcggccgagcgcaaacaccgacacctgcccgtagccgacgctgttattcacgcgtcgggcaagcagatgtggcaggcgcgtctcacggtctcgggactggcctggacgcgtcagcagaaccagtggaaagagcccgacgtctactacacgtcagcgttcgtgtttcccaccaaggacgtggcactgcggcacgtggtgtgcgcgcacgagctggtttgctccatggagaacacgcgcgcaaccaagatgcaggtgataggtgaccagtacgtcaaggtgtacctggagtccttctgcgaggacgtgccctccggcaagctctttatgcacgtcacgctgggctctgacgtggaagaggacctaacgatgacccgcaacccgcaacccttcatgcgcccccacgagcgcaacggctttacggtgttgtgtcccaaaaatatgataatcaaaccgggcaagatctcgcacatcatgctggatgtggcttttacctcacacgagcattttgggctgctgtgtcccaagagcatcccgggcctgagcatctcaggtaacctgttgatgaacgggcagcaaatcttcctggaggtacaagcgatacgcgagaccgtggaactgcgtcagtacgatcccgtggctgcgctcttctttttcgatatcgacttgttgctgcagcgcgggcctcagtacagcgagcaccccaccttcaccagccagtatcgcatccagggcaagcttgagtaccgacacacctgggaccggcacgacgagggtgccgcccagggcgacgacgacgtctggaccagcggatcggactccgacgaagaactcgtaaccaccgagcgtaagacgccccgcgtcaccggcggcggcgccatggcgagcgcctccacttccgcgggccgcaaacgcaaatcagcatcctcggcgacggcgtgcacggcgggcgttatgacacgcggccgccttaaggccgagtccaccgtcgcgcccgaagaggacaccgacgaggattccgacaacgaaatccacaatccggccgtgttcacctggccgccctggcaggccggcatcctggcccgcaacctggtgcccatggtggctacggttcagggtcagaatctgaagtaccaggagttcttctgggacgccaacgacatctaccgcatcttcgccgaattggaaggcgtatggcagcccgctgcgcaacccaaacgtcgccgccaccggcaagacgccttgcccgggccatgcatcgcctcgacgcccaaaaagcaccgaggttga

SEQ ID NO: 14747 - DNA, 45 bp, unidentified; identical to SEQ ID NO: 7503
  misc_feature 1..45: note = Synthetic
  source 1..45: mol_type = other DNA

SEQ ID NO: 14748 - DNA, 24 bp, unidentified
  source 1..24: mol_type = other DNA
  misc_feature 1..24: note = Synthetic
atgggttacatcagttataaataa

SEQ ID NO: 14749 - DNA, 54 bp, unidentified; identical to SEQ ID NO: 2415
  source 1..54: mol_type = other DNA
  misc_feature 1..54: note = Synthetic

SEQ ID NO: 14750 - DNA, 54 bp, unidentified; identical to SEQ ID NO: 2415
  source 1..54: mol_type = other DNA
  misc_feature 1..54: note = Synthetic

SEQ ID NO: 14751 - DNA, 84 bp, unidentified
  misc_feature 1..84: note = Synthetic
  source 1..84: mol_type = other DNA
atgtacaaaactactaaatgcgcttctcaattggataatctatgtaccaagatgaacaaaatgggcattctagacaaaaaatga

SEQ ID NO: 14752 - DNA, 1266 bp, unidentified
  misc_feature 1..1266: note = Synthetic
  source 1..1266: mol_type = other DNA
attaataatgacaataatattgaaaaaaatttttcggaagtgtttgttgatacaatgagcgtatttatgtcactggcacattgtgtttatgacttggaagatttaaaagataaattttacgaatatatacaaaagataaataatggtaacgttacactgtttatagatagaggaaatatagatataaaggaaaaattgcgttttaaacgtaaaactgctttaaccaacaccataaaaagaaaaacattagaaatagatactatttatgatcgtataaacaaactaaatgttaacgacgcgttttatgaagaaataaaaacagattttgagttaaaaatacaaaaacttaagtttcataattttttgtcgaataataacaatgtaaaattttgtttaaatgagtctttgttactagttaaagaagaagttaaaatagtatattgtgatggaattgatgcggaatttgtaatgtgttgtaaagcaaaagaactaaattttaaaacaggtaactggccaatactaataagcaacgatcatgacacgttactgttttcatcatttgattttatcccaaagataataaaaacaataacccaaatatattattatataccatgtttaaaatcaaaatatttatctaaaattgtaactcttgttaacggatgtgacttttttccaggtttgtatggaatctgtataaccacaaaatcgctaaataacatacagttatttgatgattttaatatagttaatatagttaaaagtttaacatttaaaaactatgttaacaaatctaacaaaattataaacatagataacataattaactttgtaaataactatgcatcgttagattcaacagtgtatcattacaaacatattccagatggtttaacaattcaggaatttttattttctgccctgtataaacataataatttttacaaaaacacattaacaaaaaataacatgtctatgtgtgcatatcttatttgtgttttatctccaaaaaaaaatataagtgtatctgacatatctaaactaaaaaaaatagtagacgaatgtaaaattaaaaaaaaatgtacagaaagtcatattatgttagtaacaaaaatatttggttatgaaattaacaaacaaagcgacataatttttggaatattaaattttaaaaacttaatgttgtgttttgatgatacattttattttaacgaaaataacatcattgttaacaaaaataaaaataatataataaatataggataa

SEQ ID NO: 14753 - DNA, 18 bp, unidentified
  misc_feature 1..18: note = Synthetic
  source 1..18: mol_type = other DNA
atgaaaaaatataaatga

SEQ ID NO: 14754 - DNA, 18 bp, unidentified
  misc_feature 1..18: note = Synthetic
  source 1..18: mol_type = other DNA
atgaaaaaatataaatga

SEQ ID NO: 14755 - DNA, 786 bp, unidentified
  misc_feature 1..786: note = Synthetic
  source 1..786: mol_type = other DNA
atggaaaatgtattcattagtagtagttactcatcaaatgaacaaacatcaatggcggtagccgctactgatatccgagagttactatcacaatatgtggatgataataccagcgtggaagacttaatagaatgggccatggaaaaatcatcaaagtactacatcaagaatataggtaatacaaaatctaatatcgaagaaactaaattcgaatcaaagaataatattggtatagaatactcaaaggattccagaaacaaactatcgtatagaaataaaccgtccattgccacaaatttggaatataaaacactatgtgacatgattaagggtactagcggtaccgaaaaagaattccttcgctatctcttgttcggtataaaatgcattaagaaaggagtagaatacaatatagataaaataaaggatgtgagttacaacgattattttaacgttctcgacgagaaatacaatacaccgtgtcctaactgtaaaagtaggaatactacaccgatgatgattcaaactagagctgctgatgaacctccattagttagacacgcgtgtagagattgcaaacaacacttcaagcctcccaaatttagagcatttcgcaatcttaatgttacaacgcaatcgatacatgaaaacaaggaaataacagagattcttccagataataatccatctcctccagaatctccagaaccagcatcgcctatagatgacgggttaatcagagccacattcgataggaacgacgaaccaccagaagatgatgaataa

SEQ ID NO: 14756 - DNA, 66 bp, unidentified; identical to SEQ ID NO: 7510
  source 1..66: mol_type = other DNA
  misc_feature 1..66: note = Synthetic

SEQ ID NO: 14757 - DNA, 72 bp, unidentified
  source 1..72: mol_type = other DNA
  misc_feature 1..72: note = Synthetic
aggattagagaagataaaacgtggaaagaatctacgcatctaaacgatttagtaaacttgactaaatcttaa

SEQ ID NO: 14758 - DNA, 66 bp, unidentified; identical to SEQ ID NO: 7510
  source 1..66: mol_type = other DNA
  misc_feature 1..66: note = Synthetic

SEQ ID NO: 14759 - DNA, 75 bp, unidentified; identical to SEQ ID NO: 7512
  misc_feature 1..75: note = Synthetic
  source 1..75: mol_type = other DNA

SEQ ID NO: 14760 - DNA, 15 bp, unidentified
  source 1..15: mol_type = other DNA
  misc_feature 1..15: note = Synthetic
atggaaaaaggataa

SEQ ID NO: 14761 - DNA, 1035 bp, unidentified
  misc_feature 1..1035: note = Synthetic
  source 1..1035: mol_type = other DNA
atggatatctttagggaaatcgcatcttctatgaaaggaaagaatgtattcatttctccagcgtcaatctcgtcagtattgacaatactgtattatggagctaatggatccactgctgaacagctatcaaaatatgtagaaaaggaggagaacatggataaggttagcgctcagaatatctcattcaaatccatgaataaagtatatgggcgatattctgccgtgtttaaagattcctttttgggaaaaattggcgataagtttcaaactgttgacttcactgattgtcgcactatagatgcaatcaataagtgtgtagatatctttactgagggaaaaatcaatccactattggatgaaccattgtctcctgatacctgtctcctagcaattagtgccgtatactttaaagcaaaatggttgatgccattcgaaaaggaatttaccagtgattatcccttttacgtatctccaacggaaatggtagatgtaagtatgatgtctatttacggcgagccatttaatcacgcatctgtaaaagaatcattcggtaacttttcaatcatagaactgtcatatgttggagatactagtatgatggtcattcttccaaacaagattgatggattagaatccatagaacaaaatctaacagatacaaattttaagaaatggtgtaactctctggaagctacgtttatcgatgtgcacattcctaagtttaaggtaataggttcgtataatcttgtggatacgctaataaagttgggactgacagatgtgttctattcaactggtgattatatcaatatgtgtaattcagatgtgagtgttgacgctatgattcacaaaacgtatatagatgtcaatgaagagtatacagaagcagctgcagcaacttctgtactagtggcagactgtgcatcaacagttacaaatgagttctgtgcagatcatccgttcatctatgtgattagacatgtcgatggtaaaattcttttcgttggtagatattgctctccaacaactaattaa

SEQ ID NO: 14762 - DNA, 45 bp, unidentified; identical to SEQ ID NO: 7518
  misc_feature 1..45: note = Synthetic
  source 1..45: mol_type = other DNA

SEQ ID NO: 14763 - DNA, 21 bp, unidentified
  source 1..21: mol_type = other DNA
  misc_feature 1..21: note = Synthetic
atgttctcgtctaagagatga

SEQ ID NO: 14764 - DNA, 6588 bp, unidentified
  source 1..6588: mol_type = other DNA
  misc_feature 1..6588: note = Synthetic
attaagaaaaacttagggaccaggattattgcagagatggagtccatctcaatcaaccagatcctataccctgaagtgcacctggatagtcctatagtcactaataagttagtagctatactggagtactctcgggtaacccatgggtacattctggaggatcagacattgacaaagaatattcgctatagggtcgagaatggttactccaatcaaatgattataaataacctcgaaattgggaatgtggtaaatctaagactcatgagttacccctaccacaggcacaagatctaccccgactgtaattatgacctattccatatttctgatcatcaaatttcttccaggctgttaaccctattcaaaaagggaaatacaatatatactaagatcagcggaaaaattattgaatgtatgaagggagtgaattcaaggctagggataagcagtgatttaagtaaagaagttacgacagggatcacagatttgggagcctacatgcagagttctcaatggtatgggccttttctatattggttcacaattaaaactgagatgcggtccatcatcaaatcagctacacacacaagtcatagacataggatagtaccttcatttgtgcatggtgagagatgtgaagttttgatatctagagacttggtaaccataattaataaaaggtcacaagatatctactatctcacatttgaaatggtacttatgtactgcgatgtagtggaaggaaggttaatgacggaaactgcaatgactgtggaccctaggtacactgagctcctctgtagagtaaagtacctatggaatttgatagacggcttcttccccaccttaggcaactccacatatcaaatcgtggcattattagagccattgtctctggcctatctccagttgaaagatatcacacttgaattgaggggcgcattccttagtcactgttttaatgaaatccatgacattttggagagtagtggagttttaactgaggagacatattctgatgttgtcaatgcattggattacatcttcattactgacgacatccacctgacaggggagatattttcattcttccgaagtttcggtcacccgcgtcttgaagctgtaacagcagccaacaatgtgagaaagtatatgaaccaaccaaaagttatcaactacgagactatgatgaagggtcatgctatattttgtggtattatcattaatgggtaccgtgataggcacggaggtagttggcctccgatttcccttccgactcatgcatcttcaatagttaggaatgccctggcttcaggtgagggattgacctacagtcaatgtattgataattggaggtcatttgctggggttaagtttgggtgtttcatgcccttgagcctagatagtgacctgactatgtatctcaaggataaagcactagcagcactcaagaaagaatgggattcggcttacccaaaggaataccttcgttataatcctcccaagccgacaggatcgagaagactggtcaatgtttttcttgatgactctacatttgatccttacaatatgatcctctacgtgataaatggctcctatttggaagaccctgatttcaacttatcttacagcctaaaagaaaaagagattaaagaagttgggagactatttgccaaaatgacctaccaaatgagggcttgccaagtcattgcagagaatttaatatcaaatggaatagggaagtatttcaaagacaacggtatggccaaagatgaacatgatcttacaaaggcactccacacactagcggtttcaggtatacctaagaacaaaaaagattaccatagaggtgaaggtgggagacagaccaatccttggtggtttggtgacaagtcaaagattaataagcgacatggacaaacctcaacggctcattctaattatgctggtgccgggtgcggaatcaagaatggacatgatcaggaggcttacgagactgtcagtgcttttatcacgactgatcttaagaaatactgtttaaattggaggtatgagacaatcagcatatttgcccagagactaaatgagatttatgggttgccttcattcttccagtggctacacaagaggttggagaaatcagtcctatatgtaagcgatcctcactgtccaccagatcttgatactcatatggatttagatgccgtcccaaactctcaaatatttataaagtacccaatgggagggatcgaaggatactgtcagaagctctggacaataagtacaataccctacctgtacctagcggctcatgagagtggagttaggattgcctcattggttcaaggagacaaccagaccatagccgtcacaaaaagagtcccaagcacctggccctatgatctcaagaagagggaggctacaaaaataactattgagtacttcttaatcctaaggcagcgattgcacgatatagggcatcatttgaaagcaaatgaaacaattatatcctcacatttctttgtttactcaaaaggtatatattatgatggaatgctgatctctcaatcacttaaaagtgtggctcggtgtgttttctggtcggaaacaattgtggatgaaactagagcagcttgcagtaatatctcgacaactcttgcaaaaagcatagaaaggggatttgaccggtatttggcttactcattgaatgtactcaagattattcaacagatccttatctccctagggtttacaataaacacttctatgactcaagacatagcaatcccattactgcagaatcaagatttgttgattaagatggcactactacctgctcctataggtggcctcaattatcttaatatgagcagattattcgtaaggaatataggtgatccagttacgtcctctttagctgacctcaaaagaatgataattgcagggattatgcctgaggagtcgatccaccaagttatgacacaacaaccaggggattcctctttcctagattgggcgagtgatccctactcagctaatctaccatgtgtccagagtatcactcggctgcttaagaatataactgcgaggcatgtactaataaatagtcccaatccgatgttaagggggttattccatgcggatagccatgaggtagatgagagtttagcaacttttctcatggatagacacatcatcagacctagagcagctcatgagattctcgacaacagcatcgcagtggctcgcgaatcacttgcagggatgctcgatactactaaagggctaataagggctagtatgaaaagaggtggactgaccccacgaatcatcacgagattatcaaattatgattatgatcagtctaaaatgggaatatcacttttaactgtgaagaaacggaacaatcttatcgatagggagtcttgctcagtccagctggcccgagccctcagaagtcacatgtgggcgaaactcgcaagaggaaggtcgatatacggacttgaggttcctgttgtactagaatcaatgaaagggtacattattaaacgtcatgagtcttgttcattatgtgaaactggctcactgaattatggttggttctttggtcccgccaattgccaattagataatatttccaaggagacatcatctttacgagttccctatattgggtcaacaacagaggaaaggacagacatgaaattagcatttgccaagtcccctagtcgctccctcaaatctgccgtgagaattgctacagtgtactcttgggcttatggtgatgacgaccagtcatggcatgaggcatggactctagcgaggcagagagctaacattaccttagaggagttaaggatgattaccccaatatcgacatccaccaatttggctcatcgattgagggatcgtaacactcaggtaaagtactcaggtacatcgttaatccgagtagcgaggtatacaacaatatcgaatgataacttatcattcattatagcagataagaaggtggatacaaatttcatttatcagcaaggaatgttgttgggattgggaatcctagaaacatatttcaggttacagacaaatacggggtcctctaatacagtgttacatctacatgttgaagcagaatgctgtgtaatccctatgactgaccatcccagagtcccaagtcaccgtactgcacctagcgccaggaaaatgtgcaccaatccattgatctacgataattctccaatcattgagaaggatgcggtacgtctatattcccagagccatagaaagcacctcgtggagtttgttacttggtcaacggggcagctgtatcacgtactagcgaaatcaactgctatgtcaatgatcgaattggttaccaaatttgagaaagatcatctgaacgaaatagctgctttaataggagacgatgatatcaatagtttcatcactgaattccttctagtagagcctagactatttacagtatacttaggccaatgtgcagctattaattgggctttcgagatacattatcaccgtccttcaggcaagtaccaaatgggagagttgctcttttcttttttgtgtaggatgagtaaaggtgtttttaaaatccttactaatgctttgagtcatcctaaagtctacaggagattttgggactgtggaataattgagccaatacacggcccctctctagatactcaaaatttacatctcacggtctgtaacatgatctaccactgttatatgatatatctagatttgctcttgaatgatgagcttgatgatttcactttcctattgtgcgagagtgatgaagatgtagtcagtgaccggtttgagaatatccaagcaaggtacctttgtattcttgcagatctgtactgtaatgcaaaaaactgcccgtcaataagggagcttgcacctataaagaagtgtgcagtacttacacaattcattaaatcggaagcattaatttctcctggggggttggattggaatgatgaaccgatagtagtagaccacttttcttgctccttaacatatctcagaagaggggcggttaaacagatcaggctgagggttgatcctgggttcgtatcggaagttctaattgacgcttctgaccataacctgggaccaattaaagctaaggagattaaattagatagcataaatttctatccccccaaggaagatgttgcacgattactcagtactataggcacagcccagcatgatctccccataatcggtactagagtaatcaactatgaagtacacgcttacaggagaatagggttgaactcatctgcttgctacaaggcagtagaagtatcctcggtaatcaagagcatgattgaaccaggagaggatgggttattcttgggtgaaggttcaggttctatgctagtcacgtatagggaaatactcaagcttaaacgttgttattacaacagaggagtgtcagtcgagtctagatctgggcaaagagagatatctccctatccatcagaagttagtcttgttgaacaccaactagggctggatcgtagtgttaaggtattattcaacgggaaaccagaggtgacatgggtaggtaatgtagattgttataagtatatcattagtaatataccatcttcaagtctgggactaatccactcagatatcgagaccttaccaaataaggacctagttgaaaagctggaagaattaactgccatattgtcgatgacatttattttaggtaaaataggatctctcctaataatcaagataatgccgacaagcggggacttagttcaaggattcatcggatacaccactcctttttttagagagagcattattgtataccctagatacagtaactttatctccactgagtgttatctagtatttgttgggcttaagtacaatagattaatcaaccctgaaggaataaaacaacaactactaaaattgagcataagaacatcaccgggatttgtagcacatttgttatctatgaagcaagcaaactacctacaatcccttattggactccctgttcagaaaggattctttaatagagtgttgagtgggttgaccccgattgaaaaagttcttattaattgcgggttaactgtgaacgggcccaaggtatgtaagaacttagtacatcatgatatcgcgtctggatcagagggtcttgtcaactcaactgttattttatacaaagaattggcaaggtttaaggaaaacacaaggagtcaacaaggcatgtttcacgcttatccggttcttgcagatagtaggcaaagagaattagtatccagaatcgctaggaagtattgggggtatattatactgtattcaacagaacagggggcgctcaatcaattggtaagaaatcttaaagcgggctacttattatttgatgttcatcacaattttctcgtcaagaatctttccaaatccgaaagggtcttaatacggactcttatcccacggagagagtggttatttaagcttgagacaagtgagataaaggagtggtttaagttgatagggtacggtgccctcatcagagagtaa

SEQ ID NO: 14765 - DNA, 30 bp, unidentified; identical to SEQ ID NO: 7525
  misc_feature 1..30: note = Synthetic
  source 1..30: mol_type = other DNA

SEQ ID NO: 14766 - DNA, 228 bp, unidentified
  misc_feature 1..228: note = Synthetic
  source 1..228: mol_type = other DNA
atgaactgtgatttaatgaaacagtatatagaatttgtggcggatagattattgttggaattgggatgcgataaatactattgttcaaaaaatccttttgattttatggaaaatatttcattagaaggaaaaacaaatttctttgaaaagagagttagtgaatatcaaaaaatgtcagttatgtcaaataaaaaagataatgtgttttctctagatattgatttttaa

SEQ ID NO: 14767 - DNA, 24 bp, unidentified
  misc_feature 1..24: note = Synthetic
  source 1..24: mol_type = other DNA
gtggttggagtagggtactcgtga

SEQ ID NO: 14768 - DNA, 78 bp, unidentified; identical to SEQ ID NO: 7529
  misc_feature 1..78: note = Synthetic
  source 1..78: mol_type = other DNA

SEQ ID NO: 14769 - DNA, 195 bp, unidentified
  misc_feature 1..195: note = Synthetic
  source 1..195: mol_type = other DNA
atgtcttctaaagggggtagtagtggcggcatgtggagtgtctttatccatggacatgatggtagtaataaaggatctaaaacttatacatctggtggcagtggaatgtggggaggaggatcgtccagtggtgtaaaaagtggggttaatggaggtgttaacggaggtgtaaaatctggaactggtaaaatttaa

SEQ ID NO: 14770 - DNA, 18 bp, unidentified
  source 1..18: mol_type = other DNA
  misc_feature 1..18: note = Synthetic
atgaaaaaatataaatga

SEQ ID NO: 14771 - DNA, 141 bp, unidentified; identical to SEQ ID NO: 7531
  misc_feature 1..141: note = Synthetic
  source 1..141: mol_type = other DNA

SEQ ID NO: 14772 - DNA, 192 bp, unidentified; identical to SEQ ID NO: 7535
  misc_feature 1..192: note = Synthetic
  source 1..192: mol_type = other DNA

SEQ ID NO: 14773 - DNA, 1173 bp, unidentified
  misc_feature 1..1173: note = Synthetic
  source 1..1173: mol_type = other DNA
atgcatcccgtactgcggcagatgcgcccccaccctccaccgcaacagcagccccctcctacgcaacagccggcgcttctgcctccgccccagcagcagcaacttccagccactaccgccgcggccgccgtgagcggggccgggcagagtcagtatgacctggctttggaagagggcgaggggctggcgcgcctgggggcgtcgtcgccggagcggcacccgcgcgtgcagatgaaaagggacgctcgcgaggcctacgtgcccaagcagaacctgttcagagacaggagcggcgaggagcccgaggagatgcgcgcagcccgtttccacgcggggcgggagctgcggcgcggcctggacagaaagagggtgctgagggacgaggatttcgaggcggacgagctgacggggatcagccctgcgcgcgcgcacgtggccgcggccaacctggtcacggcgtacgagcagaccgtgaaggaggagagcaacttccaaaaatccttcaacaaccacgtgcgcaccctgatcgcgcgcgaggaggtgaccctgggcctgatgcacctgtgggacctgctggaggccattgtgcagaaccccaccagcaaaccgctgacggcgcagctgttcctggtggtgcagcacagtcgggacaacgagacttttagggaggcgctgctgaatatcaccgagcccgagggccgctggcttctggacctggtgaatattctgcagagcatcgtggtgcaggagcgcgggctgccgctgtccgagaagctggcggccatcaacttttcggtgctgagtttgggcaagtactacgctaggaagatctacaagaccccgtacgtgcccatagacaaggaggtgaagatcgacgggttttacatgcgcatgaccctgaaagtgctgaccctgagcgacgatctgggggtgtaccgcaacgacaggatgcgccgcgcggtaagcgccagcaggcggcgcgagctgagcgatcaggagctgatgcacagcctgcagcgggccctgaccggggccgggaccgagggggagagctactttgacatgggcgcggacctgcactggcagcccagccgccgggtcttggaagccgcggcggtcccttacgtagaagaggtggacgatgaggatgagggcgagtacctggaagactga

SEQ ID NO: 14774 - DNA, 30 bp, unidentified; identical to SEQ ID NO: 7538
  misc_feature 1..30: note = Synthetic
  source 1..30: mol_type = other DNA

SEQ ID NO: 14775 - DNA, 24 bp, unidentified
  source 1..24: mol_type = other DNA
  misc_feature 1..24: note = Synthetic
atgcgcactggcaaaatactctga

SEQ ID NO: 14776 - DNA, 207 bp, unidentified
  source 1..207: mol_type = other DNA
  misc_feature 1..207: note = Synthetic
atgtgtcattacacgccgtcacagcagcagaggaaaaaaggaagaggtcgtgcgtcgacgctgagttactttcaagatggccaccccatcgatgctgccccaatgggcatacatgcacatcgccggacaggatgcttcggagtacctgagtccgggtctggtgcagttcgcccgcgccacagacacctacttcaatctgggaaataa

SEQ ID NO: 14777 - DNA, 315 bp, unidentified
  misc_feature 1..315: note = Synthetic
  source 1..315: mol_type = other DNA
agggacaaaaaaagcaaaataggagaaatcaaaacaaaaagtacagaacaccaaaacaacaaaaccaaaaaatctgatctattaaaaataaaaatcccaaaagagactggcaacacagcaaacactaaacacaatgccaacttcaacactgctaattattacaaccataattatggcatctttctgccaaatagatatcacaaaactacagcatgtaggtgtattggtcaacagtcccaaagggatgaagatatcacaaaacttcgaaacaagatatttaattttgagcctcataccaaaaatagaagactctaa

SEQ ID NO: 14778 - DNA, 24 bp, unidentified
  misc_feature 1..24: note = Synthetic
  source 1..24: mol_type = other DNA
atgaatattaaaacactagtatag

SEQ ID NO: 14779 - DNA, 762 bp, unidentified
  source 1..762: mol_type = other DNA
  misc_feature 1..762: note = Synthetic
atgaaacaatatatcgtcctggcatgcatgtgcctggcggcagctgctatgcctgccagtcttcagcaatcctcatcctcgtgtactgaagaagaaaacaaacattatatgggaatcgatgttattatcaaagtcacaaagcaagaccaaacaccgaccaatgataagatttgccaatccgtaacggaaattacagagtccgagtcagatcccgaggtggaatcagaagatgattccacatcagtcgaggatgtagatcctcctaccacttattactccattattggcggaggtctgagaatgaactttggattcaccaaatgtcctcagattaaatccatctcagaatccgctaatggaaacgcagtgaatgctagattgtccagcgtgcccctaggacaaggtaaggactctcccgctatcactcgtgcagaagctctggctatgatcaaagactgtgagctgtctatcgacattagatgtagcgaagaagagaaagacagcgacatccagacccatccagtactcgagtctaacatctctcataagaaagtgagttacgaagatatcatcggttcaacgatcgttgatacaaaatgcgtcaagaatctagagtttagtgttcgtatcggagacatgtgcaaggaatcgtctgatcttgaggtcaaggatggatttaagtatgtcgacggatcggtatctgaaggtgtaaccgatgatacttcactcatcgattcaacaaaactcaaatcgtgtgtctga

SEQ ID NO: 14780 - DNA, 66 bp, unidentified
  source 1..66: mol_type = other DNA
  misc_feature 1..66: note = Synthetic
atgttattatcaaagtcacaaagcaagaccaaacaccgaccaatgataagatttgccaatccgtaa

SEQ ID NO: 14781 - DNA, 1656 bp, unidentified
  misc_feature 1..1656: note = Synthetic
  source 1..1656: mol_type = other DNA
atgaatggttccagaaaaagaagtagaagggctgctgtagaagatttatataaaagctgtcgtatgggtggtgactgtttacctgatgtagttaataaagttgaagggaaaactcttgctgatattcttttacaagcctttggtagtataatatttttagggaatttgggaattggaagtggcaaagggtcagctggtgttgtgggttcacgacctattcctgaaacaattgcaccgactcgacctactacagttagacctagcacaagacctacacgaccgttttcggttcctttagatcctataggatcagggaggcccattgatccagcaggtgcaagcaggcccatagatgttgtagatccttccaattctgctatagtacctctatcagaaattacccctgacactgttattactattgatcaaccagaaattactgtaattaatccttcactggatcctgtgacagacacaacttctatatctagtcatccaacagttattcaaggtagcggtgacactttagctgttcttaatgtttctcaagtagatcctccagtaaatagagttgtttatcaaactccagcaataacacatttttctgttacattagaaagttcttctggacatattaatccagactataatgtatttgtagaccctttaggttttgcagaaaatattgtgtttggagaagaaattcctttagatccaattaatcccagggcacaatttgaaattgaagaaccccaacctacaagtagtacacctttagacagagttcagagagtactaactagagcccgccatttttatgggcgtcacattcagcaagtttcaacaagaaatccagactttctaggaaggccttcccgcgcaatacagtttgaatttgaaaatgccgcccttgaccccgaggtaacattagagtttttacaagatgtagatgaagtcactgcagcaccagatccagactttgcagacattaaaaggttagggcgacctagttattcaaccacacctggaggaactgtaagagtcagcaggctaggaagtagagctggtgtcactacaagaagaggcacattgttaagtcaggatgttcatttttattatgatgtaagcaacatagctcatcctgaggaaattgagatgtcagtcattggggaatctagtacatcgtttaatacagtgaacccaaacactataagtacaaacgttgacagtctgtcagcttcaaatacattttatcaagatgaagatttagtagattcctactttgaaaattttgataatgctcacttattaattaatggtacagatgaggaaggtgacaggtttgagataccaactataccatcaggctcttctataaaagtttttatacacgatgtgggaaatgatatttttgtaacagcacctaataccaatacaggtataccgtttgtggttcctaacataccatatgaaccaatacagccatcatttggagtagatgtgtattcagatgatttttatttacatccaggtttataccataaaaaaaaaaaagagacgaatcgaatatttctaatgttttgcagatgtccttatggatgcagaccactggaaaactgtatcttccacctcaaaagccagttgctaaagtgctga

SEQ ID NO: 14782 - DNA, 21 bp, unidentified
  misc_feature 1..21: note = Synthetic
  source 1..21: mol_type = other DNA
atgcaaaaatccagtttctaa

SEQ ID NO: 14783 - DNA, 36 bp, unidentified; identical to SEQ ID NO: 7550
  source 1..36: mol_type = other DNA
  misc_feature 1..36: note = Synthetic

SEQ ID NO: 14784 - DNA, 57 bp, unidentified
  source 1..57: mol_type = other DNA
  misc_feature 1..57: note = Synthetic
atgaccgacgataatataaacatcttgatactttttctagaaaaaaaattgaattga

SEQ ID NO: 14785 - DNA, 36 bp, unidentified; identical to SEQ ID NO: 7555
  source 1..36: mol_type = other DNA
  misc_feature 1..36: note = Synthetic

SEQ ID NO: 14786 - DNA, 51 bp, unidentified; identical to SEQ ID NO: 7556
  misc_feature 1..51: note = Synthetic
  source 1..51: mol_type = other DNA

SEQ ID NO: 14787 - DNA, 351 bp, unidentified
  misc_feature 1..351: note = Synthetic
  source 1..351: mol_type = other DNA
atgaagtactgcctgcggatggcggtggagggcgcccttacagagctttttaatattcacggtttaaacctgcaaaatcagtgtgttcaaataatacaacagtggaagaatgaaaattacctgggaatggttcagtcaggcagtttgatgatagaagagtttcatgataatgcatttgctttgcttttgtttatcgaaatcagagctgtggctcttttagaagctgttgttgaacatttggaaaatcgcttacaatttgatctggctgtgatctttcaccagcacagcggaggcgatcgctgccacctgcgagatttacgcattcaaatccttgctgaccgtcttgattaa

SEQ ID NO: 14788 - DNA, 39 bp, unidentified; identical to SEQ ID NO: 303
  misc_feature 1..39: note = Synthetic
  source 1..39: mol_type = other DNA

SEQ ID NO: 14789 - DNA, 27 bp, unidentified
  source 1..27: mol_type = other DNA
  misc_feature 1..27: note = Synthetic
atgtcaactatcagatcttcgttctga

SEQ ID NO: 14790 - DNA, 84 bp, unidentified; identical to SEQ ID NO: 7563
  misc_feature 1..84: note = Synthetic
  source 1..84: mol_type = other DNA

SEQ ID NO: 14791 - DNA, 57 bp, unidentified; identical to SEQ ID NO: 6830
  source 1..57: mol_type = other DNA
  misc_feature 1..57: note = Synthetic

SEQ ID NO: 14792 - DNA, 15 bp, unidentified
  source 1..15: mol_type = other DNA
  misc_feature 1..15: note = Synthetic
ataatagtgacataa

SEQ ID NO: 14793 - DNA, 597 bp, unidentified
  misc_feature 1..597: note = Synthetic
  source 1..597: mol_type = other DNA
atgtccatccttatatcgcccagcaataacacaggctggggcctgcgcttcccaagcaagatgtttggcggggcaaagaagcgctccgaccaacacccagtgcgcgtgcgcgggcactaccgcgcgccctggggcgcgcacaaacgcggccgcactgggcgcaccaccgtcgatgacgccattgacgcggtggtggaggaggcgcgcaactacacgcccacgccgccaccagtgtccacagtggacgcggccattcagaccgtggtgcgcggagcccggcgttatgctaaaatgaagagacggcggaggcgcgtagcacgtcgccaccgccgccgacccggcactgccgcccaacgcgcggcggcggccctgcttaaccgcgcacgtcgcaccggccgacgggcggccatgcgggccgctcgaaggctggccgcgggtattgtcactgtgccccccaggtccaggcgacgagcggccgccgcagcagccgcggccattagtgctatgactcagggtcgcaggggcaacgtgtactgggtgcgcgactcggttagcggcctgcgcgtgcccgtgcgcacccgccccccgcgcaactag

SEQ ID NO: 14794 - DNA, 420 bp, unidentified
  misc_feature 1..420: note = Synthetic
  source 1..420: mol_type = other DNA
ttgtgtttaatgcaggaacccgcagacatgtttgagagaaaaatggtgtctttttctgtggtggttccggaacttacctgcctttatctgcatgagcatgactacgatgtgcttgcttttttgcgcgaggctttgcctgattttttgagcagcaccttgcattttatatcgccgcccatgcaacaagcttacataggggctacgctggttagcatagctccgagtatgcgtgtcataatcagtgtgggttcttttgtcatggttcctggcggggaagtggccgcgctggtccgtgcagacctgcacgattatgttcagctggccctgcgaagggacctacgggatcgcggtatttttgttaatgttccgcttttgaatcttatacaggtctgtgaggaacctgaatttttgcaatcatga

SEQ ID NO: 14795 - DNA, 33 bp, unidentified; identical to SEQ ID NO: 7572
  misc_feature 1..33: note = Synthetic
  source 1..33: mol_type = other DNA

SEQ ID NO: 14796 - DNA, 960 bp, unidentified
  source 1..960: mol_type = other DNA
  misc_feature 1..960: note = Synthetic
atggaaccgatccttgcaccaaatccaaatagatttgttattttcccaatccaatatcatgacatctggaatatgtataaaaaggcagaggcatcattttggacagtggaagaagtagatatatctaaagatatcaatgattggaataaactaacacccaacgaaaaacattttataaaacatgtattggcgttttttgcagccagtgacggaatagtgaatgaaaatttagctgaacgattttgtacagaagtgcagattaccgaggctagatgtttctacggatttcagatggccattgaaaacattcattcggaaatgtatagtcttttgatcgatacttatgttaaagatagtaatgaaaaaaactatctctttaatgccatagaaacgatgccttgtgtaaaaaagaaggccgattgggctcaaaagtggatacatgacagcgccagttatggagagagacttgttgcctttgccgcagtagaaggaatcttcttttctgggtcatttgcgtccatattttggcttaaaaagcgtggcctaatgcccggactcacgttttccaacgaactaattagtagagacgagggtctgcactgcgatttcgcatgtttgatgtttaaacatttattgcatccaccgagtgaagaaaccgttagatctattataacagatgcggtatccattgaacaagaatttcttactgcggctcttccagttaaacttataggaatgaattgtgaaatgatgaaaacatatatagaatttgtcgcggatagattgatttctgaattgggatttaaaaaaatttataatgttaccaatccgtttgatttcatggaaaatatatcattggaaggaaaaactaattttttcgaaaaacgtgtgggtgaataccaaaaaatgggagttatgtctcaagaagataatcatttttctctagatgttgacttttaa

SEQ ID NO: 14797 - DNA, 36 bp, unidentified; identical to SEQ ID NO: 7575
  misc_feature 1..36: note = Synthetic
  source 1..36: mol_type = other DNA

SEQ ID NO: 14798 - DNA, 36 bp, unidentified; identical to SEQ ID NO: 7575
  source 1..36: mol_type = other DNA
  misc_feature 1..36: note = Synthetic

SEQ ID NO: 14799 - DNA, 258 bp, unidentified; identical to SEQ ID NO: 13180
  source 1..258: mol_type = other DNA
  misc_feature 1..258: note = Synthetic

SEQ ID NO: 14800 - DNA, 258 bp, unidentified; identical to SEQ ID NO: 13180
  source 1..258: mol_type = other DNA
  misc_feature 1..258: note = Synthetic

SEQ ID NO: 14801 - DNA, 264 bp, unidentified
  misc_feature 1..264: note = Synthetic
  source 1..264: mol_type = other DNA
atggatatgccttcctattacttggtaattgtgggaatagtgatggtctgctcctgcactttctttgctattatgatctacccctgttttgatctcggctggaactctgttggggcatttacatacacactacaaaacagttcaccagccttcacaccgcctccccgcagaaatcagttccccctgattcagtacttagaagagccccctccccggcccccttccactgttagttactttcacataaccgccggcgatgactga

SEQ ID NO: 14802 - DNA, 378 bp, unidentified
  misc_feature 1..378: note = Synthetic
  source 1..378: mol_type = other DNA
atggtgagacaagtagccaacagggaagggttgcaaatatcatttgggcacacctatgataatattgatgaagcagacagtattcagcaagtaactgagaggtgggaagctcaaagccaaagtcctaatgtgcagtcaggtgaatttattgaaaaatttgaggctcctggtggtgcaaatcaaagaactgctcctcagtggatgttgcctttacttctaggcctgtacggaagtgttacttctgctctaaaagcttatgaagatggccccaacaaaaagaaaaggaagttgtccaggggcagctcccaaaaaaccaaaggaaccagtgcaagtgccaaagctcgtcataaaaggaggaatagaagttctaggagttaa

SEQ ID NO: 14803 - DNA, 222 bp, unidentified
  misc_feature 1..222: note = Synthetic
  source 1..222: mol_type = other DNA
atgaaacacagattgtattctgaaggattgagtattagtaatgatttaaactcgataatcggtcaacaatctacaatggatacggatatagaaatagacgaagatgacatcatggaacttcttaatatattgactgagttaggttgtgatgtcgactttgatgaaaattttagcgatatagccgatgatattctagaatcgttgatagaacaggatatataa

SEQ ID NO: 14804 - DNA, 222 bp, unidentified
  misc_feature 1..222: note = Synthetic
  source 1..222: mol_type = other DNA
atgaaacacagattgtattctgaaggattgagtattagtaatgatttaaactcgataatcggtcaacaatctacaatggatacggatatagaaatagacgaagatgacatcatggaacttcttaatatattgactgagttaggttgtgatgtcgactttgatgaaaattttagcgatatagccgatgatattctagaatcgttgatagaacaggatgtataa

SEQ ID NO: 14805 - DNA, 21 bp, unidentified
  misc_feature 1..21: note = Synthetic
  source 1..21: mol_type = other DNA
atggaaaagataaagttttag

SEQ ID NO: 14806 - DNA, 90 bp, unidentified; identical to SEQ ID NO: 7581
  source 1..90: mol_type = other DNA
  misc_feature 1..90: note = Synthetic

SEQ ID NO: 14807 - DNA, 30 bp, unidentified; identical to SEQ ID NO: 7585
  misc_feature 1..30: note = Synthetic
  source 1..30: mol_type = other DNA

SEQ ID NO: 14808 - DNA, 120 bp, unidentified; identical to SEQ ID NO: 7586
  source 1..120: mol_type = other DNA
  misc_feature 1..120: note = Synthetic

SEQ ID NO: 14809 - DNA, 1026 bp, unidentified
  source 1..1026: mol_type = other DNA
  misc_feature 1..1026: note = Synthetic
atgttgatattaacaaaagtgaatatatatatgttaataattgtattgtggttatatggctacaatttcataatgagcggaagtcagtgtccgatgattaatgacgatagatttactctgaaaagaaagtatcaaatcgatagtgtagagtcgacaatgaaaatggataagaagaggacaaagtttcaaaatagagccaaaatggtaaaagaaataaatcagacaataagagcagcacaaactcattacgagacattgaaactaggatacataaaatttaagaaaatgattaggactactactttagaagatataacaacatctattccaaatattcagaaaatttataaactattctcggacatttcagccattggcaaagtatcacagaatccgagtaaaatggcatatgctttactgctttacatgttccccaatttgtttggagatgaccatagattcattctttatagaatgtttccaatgagtaaaatcaaacacaagatcttctctcctttcaaacttaatcttattagaatattagtggaagaaagattctataataatgaatgcagatctaataaatggagaataattggaacacaagttgataaaatgttgatagctgaatctgataaatatacaatagatgcaaggtatcgcctaagacctatatatagaatcaagggaaaatctgaagaagataccctcttcatcaaacagatggtagaccaatgtgtgacatcccaggaattggtggaaaaagtgttgaagatactgtttagagatttgttcaagagtggagaatacaaagcgtacagatacgatgatgacgtagaaaatggattcattggattggataaactaaaattaaacattgttcatgatatagttgaaccatgtatgcctgttcgtaggccagtggctaagatactgtgtaaagaaatggtaaataaatactttgagaatccgctgcatattattggtaagaatcttcaagagtgcattgactttgttagtgaatag

SEQ ID NO: 14810 - DNA, 1026 bp, unidentified
  misc_feature 1..1026: note = Synthetic
  source 1..1026: mol_type = other DNA
atgttgatattaacaaaagtgaatatatatatgttaataattgtattgtggttatacggctacaattttataattagtgaaagtcagtgtccgatgatcaatgacgatagctttactctgaaaagaaagtatcaaatcgatagtgcggagtcaacaataaaaatggataagaagaggacaaagtttcagaatagagccaaaatggtaaaagaaataaatcagacaataagagcagcacaaactcattacgagacattgaaactaggatacataaaatttaagagaatgattaggactactactctagaagatatagcaccatctattccaaataatcagaaaacttataaactattctcggacatttcagccatcggcaaagcatcacggaatccaagtaagatggtatatgctctgctgctttacatgtttcccaatttgtttggagatgatcatagattcattcgttatagaatgcatccaatgagtaaaatcaaacacaagatcttctctcctttcaaacttaatcttattagaatattagtggaagaaagattctataataatgaatgcagatctaataaatggagaataattggaacacaagttgataaaatgttgatagctgaatctgataaatatacaatagatgcaaggtataacctaaaacccatgtatagaatcaagggaaaatctgaagaagataccctctttatcaaacagatggtagaacaatgtgtgacatcccaggaattggtggaaaaagtgttgaagatactgtttagagatttgttcaagagtggagaatacaaagcgtacagatacgatgatgatgtagaaaatggatttattggattggatacactaaaattaaacattgttcatgatatagttgaaccatgtatgcctgttcgtaggccagtggctaagatactgtgtaaagaaatggtaaataaatactttgagaatccgctacatattattggtaaaaatcttcaagagtgcattgactttgttagtgaatag

SEQ ID NO: 14811 - DNA, 204 bp, unidentified
  source 1..204: mol_type = other DNA
  misc_feature 1..204: note = Synthetic
atgctgccttcattagatgcccgactacattttattaatgttggatacagacacttaacctatttaaaatatttacatcacagagcaaatcaatgcagtcactcggagattatcaaaaaaaaaatcaaactactcacttcaattttatcgaaactgttaaatgtgaatggaattttagaacatcaggaatatttaaatacataa

SEQ ID NO: 14812 - DNA, 405 bp, unidentified
  misc_feature 1..405: note = Synthetic
  source 1..405: mol_type = other DNA
attatcacattttatcgaacaatgttatatactatgagaattaaatcagcaattattttttctcttgaggacgtaacacattaccagttcaaaatactaatatttttaacaaaggatgaactaaatataagcgatgaagaaaaacaaatactagatagagtagattttgccgaaaaactatttcaaacttatccaggtattaaatcattatattttttagaaaaagcaataagtatggttccaaatgcaaaatacgcaagaagtaacataaacagattaattagtgacttagtaccatctgttcagtttgaaccagtttgtaaaaaaattatacgaaaacacagatttagaaattccaatgttatgaaaaatataagtagtacagtaagaagaaagttattttaa

SEQ ID NO: 14813 - DNA, 741 bp, unidentified
  source 1..741: mol_type = other DNA
  misc_feature 1..741: note = Synthetic
atgaaacaatatattgtcctggcatgcatgtgcctagtggcagctgctatgcctactagtcttcaacaatcctcatcctcgtgtactgaagaagaaaacaaacatcatatgggaatcgatgttattatcaaagtcacaaagcaagaccaaacaccgaccaatgataagatttgtcaatccgtaacggaagttacagagaccgaagatgatgaggtatccgaagaagttgtaaaaggagatcccaccacttattacactatcgtcggcgcgggtcttaacatgaactttggattcaccaaatgcccaaagatttcatccatctccgaatcctctgatggaaacactgtgaatactagattgtccagcgtgtcaccaggacaaggtaaggactctcccgcgatcacgcgtgaagaagctctggctatgatcaaagactgtgagatgtctatcgacatcagatgtagcgaagaagagaaagacagcgacatcaagacccatccagtacttgggtctaacatctcacataagaaagtgagttacaaagatatcatcggttcaacgatcgttgatacaaaatgtgttaagaacctagagtttagcgtacgtatcggagacatgtgtgaggaatcatctgaacttgaagtcaaggatggattcaagtatgtcgacggatcggcatctgaaggtgcaaccgatgatacttcactcatcgattcaacaaaactcaaagcatgtgtctga

SEQ ID NO: 14814 - DNA, 741 bp, unidentified; identical to SEQ ID NO: 14813
  source 1..741: mol_type = other DNA
  misc_feature 1..741: note = Synthetic

SEQ ID NO: 14815 - DNA, 81 bp, unidentified
  source 1..81: mol_type = other DNA
  misc_feature 1..81: note = Synthetic
atcatatgggaatcgatgttattatcaaagtcacaaagcaagaccaaacaccgaccaatgataagatttgtcaatccgtaa

SEQ ID NO: 14816 - DNA, 81 bp, unidentified; identical to SEQ ID NO: 14815
  source 1..81: mol_type = other DNA
  misc_feature 1..81: note = Synthetic

SEQ ID NO: 14817 - DNA, 105 bp, unidentified
  misc_feature 1..105: note = Synthetic
  source 1..105: mol_type = other DNA
atgttgcacgcacaaacatatattatcatgcaggaacatccagactacttgcagttggacatccctattttcctattaaaaaacctaacaataacaaaatattag

SEQ ID NO: 14818 - DNA, 36 bp, unidentified; identical to SEQ ID NO: 7600
  source 1..36: mol_type = other DNA
  misc_feature 1..36: note = Synthetic

SEQ ID NO: 14819 - DNA, 309 bp, unidentified
  misc_feature 1..309: note = Synthetic
  source 1..309: mol_type = other DNA
atgtcatttcaacggggcaaccggagcatccggccggcgatgtccgaggcgttgcagaatgacttcagctacaacccgcgaccgcctccgccgagcgcagaagagattgacttcttctgcgtggacatgcgcaaagtactgatggaaattgaggccaagcccagcagctccaagtaccccgatttcatccacccggttgacagcagcccgccgtgcacgccggcgcgcaagcgcaacggctccggccgcaaggcaccgaacaagaccccggtgccgcagcatgccaagcgtgacggctactcccgctaa

SEQ ID NO: 14820 - DNA, 1167 bp, unidentified
  misc_feature 1..1167: note = Synthetic
  source 1..1167: mol_type = other DNA
atgcttacgatgttaaccgaccgaatcgactctcaactggtactgtcgcggctgccgcgctcccgttttcagcgattctgggagacccctacgttaataatgaaggaagagtccgcaccgtcatcaggctccatcatcctagccgagaaatccgtcaatatgcgttactgcgtgcgtttcgctagcgatagcgattttcaaaccacatttacgctgccccaatcgaccgaggagaaatacgacaaagagcagcatccgggagaggatgaagcgtcgtcgccattaccgtcgccgctcaaagttccctacaagtggatgccttccagtttcatcgtcaaacaatgccacacgcagctggccttttacaataaacacatcatttggctatcacgcgagcgcaaagtgcccacctcgctgggcgtcagcctctatatccccgaaggttttttcggcattaccttttacaaatgcctggacgcgcaattcgtttgcatgcccgagctgctggaatccgggctgcaagtcccgcagttggatgtcgtcaacctcaacgacacttttcagtccatctttccgggcaccatcgaaggcgatatcggcgttttcccctgttttgtgccagaaccctggcagctcatgaacttgccgccgcccaacgaacaccgtttcttttcattacgtacccgtcagacgctggtgatcggtccgggtcacacgcaaaccgtctattttgacgcggcctacgtgcacgcgcccggtatctgcgccctcatagtgggcgtgcgccagtttagtcaatcggatctcatcatccgacccaccatctggctcccgggtaccgcggccggcgtgacggtggtcaacacttcgcacaccaccgtctgcatctccccacacaccaccgtagccaaagcggtttttaccacccaccgctttacctatctgccggtgggcagtcaccccctaggacagatgatcgtgccgcccacccccgacatcggtttcacccacacacccgagcacgcgttgctgcaacggacaccctcgccggtagacgatgacgtcgacgagacagaagaagatgaaaagagctccgacgcagaaagccctgtcaacacgagtgacgttatttttgacgtcggtccgaaacctccccgtcatccctga

SEQ ID NO: 14821 - DNA, 48 bp, unidentified; identical to SEQ ID NO: 7607
  source 1..48: mol_type = other DNA
  misc_feature 1..48: note = Synthetic

SEQ ID NO: 14822 - DNA, 15 bp, unidentified
  misc_feature 1..15: note = Synthetic
  source 1..15: mol_type = other DNA
atggcgttcgtgtag

SEQ ID NO: 14823 - DNA, 24 bp, unidentified
  source 1..24: mol_type = other DNA
  misc_feature 1..24: note = Synthetic
atgaaacaacccctcagccgctga

SEQ ID NO: 14824 - DNA, 15 bp, unidentified
  misc_feature 1..15: note = Synthetic
  source 1..15: mol_type = other DNA
atggcgttcgtgtag

SEQ ID NO: 14825 - DNA, 15 bp, unidentified
  source 1..15: mol_type = other DNA
  misc_feature 1..15: note = Synthetic
atggcgttcgtgtag

SEQ ID NO: 14826 - DNA, 111 bp, unidentified; identical to SEQ ID NO: 7612
  misc_feature 1..111: note = Synthetic
  source 1..111: mol_type = other DNA

SEQ ID NO: 14827 - DNA, 60 bp, unidentified; identical to SEQ ID NO: 7613
  misc_feature 1..60: note = Synthetic
  source 1..60: mol_type = other DNA

SEQ ID NO: 14828 - DNA, 54 bp, unidentified; identical to SEQ ID NO: 7614
  source 1..54: mol_type = other DNA
  misc_feature 1..54: note = Synthetic

SEQ ID NO: 14829 - DNA, 36 bp, unidentified; identical to SEQ ID NO: 7616
  source 1..36: mol_type = other DNA
  misc_feature 1..36: note = Synthetic

SEQ ID NO: 14830 - DNA, 24 bp, unidentified
  misc_feature 1..24: note = Synthetic
  source 1..24: mol_type = other DNA
acgaccgtattcacaaagctgtga

SEQ ID NO: 14831 - DNA, 24 bp, unidentified
  misc_feature 1..24: note = Synthetic
  source 1..24: mol_type = other DNA
atgaccgaatccacaaagcagtaa

SEQ ID NO: 14832 - DNA, 87 bp, unidentified; identical to SEQ ID NO: 7620
  misc_feature 1..87: note = Synthetic
  source 1..87: mol_type = other DNA

SEQ ID NO: 14833 - DNA, 711 bp, unidentified
  misc_feature 1..711: note = Synthetic
  source 1..711: mol_type = other DNA
atgcaagccagcaatatgtctgcttctcattctctctctcagtctccaaatctacatcctgattttacttataagcgacaagaagctctctggaagcaacttgtctccgcagaacacagaaaattctgctcttgtggagactacacccaacatttcagatttcctagtcctgtaaaggaggacgaatgtatcagagtcgtaggcgaagaaggcggagatggggtcgccgtatcctatcacgttacaaaagaaagtggggacgaagatcccgaagaggtcatggcatctatcgccgttggagacgatggagacgacgacctcgaactgtgcaagtggaatctgaagccagagccccttatcctaaaacaaacagacccccaaccactgctgacatcctccccggggatctcgacagtgatgggatcctcgaagacgaggcttatgaacgaattactagagataatccatgccctaagcggcccagacccctgggaatccgatggtgggatgggaccccagggagaaccctccaagagcaacagcaggctgctgtactcagacccaaaccccgaagacagctcctcagacgactcagagatgtcctacttcagctctagcgacagcacagacgcagacataacttaccctaacatggagggggggaggaccccccctagatacccccccccgaacatgggcatttacttttaa

SEQ ID NO: 14834 - DNA, 333 bp, unidentified
  source 1..333: mol_type = other DNA
  misc_feature 1..333: note = Synthetic
atgcaagccagcaatatgtctgcttctcattctctctctcagtctccaaatctacatcctgattttacttataagcgacaagaagctctctggaagcaacttgtctccgcagaacacagaaaattctgctcttgtggagactacacccaacatttcagatttcctagtcctgtaaaggaggacgaatgtatcagagtcgtaggcgaagaaggcggagatggggtcgccgtatcctatcacgttacaaaagaaagtggggacgaagatcccgaagaggtcatggcatctatcgccgttggagacgatggagacgacgacctcgaactgtggtaa

SEQ ID NO: 14835 - DNA, 117 bp, unidentified
  source 1..117: mol_type = other DNA
  misc_feature 1..117: note = Synthetic
ctgattttacttataagcgacaagaagctctctggaagcaacttgtctccgcagaacacagaaaattctgctcttgtggagactacacccaacatttcagatttcctagtcctgtaa

SEQ ID NO: 14836 - DNA, 117 bp, unidentified; identical to SEQ ID NO: 14835
  source 1..117: mol_type = other DNA
  misc_feature 1..117: note = Synthetic

SEQ ID NO: 14837 - DNA, 231 bp, unidentified
  misc_feature 1..231: note = Synthetic
  source 1..231: mol_type = other DNA
atggagagggatgttacgattgccttgtttacaatttaccttgtctgtatattctggggtatctcatctattatctggtttatgtacttaactatccgtttgtacatgatccggtcagagatttataaaaagatctctatccttaacaatgaggttgtattcttgcaagagttgtctagagagcatcctgaggttttggtgaacggaccacccccctatacacaggtataa

SEQ ID NO: 14838 - DNA, 696 bp, unidentified
  source 1..696: mol_type = other DNA
  misc_feature 1..696: note = Synthetic
atggagggcaatggctccaacccagagccaaagcagagcaacaacccgatggtcgttgacccgcctggcacaacaggtccgaccacatcccacgttgttgttgctaatccggagcaacccaatggggccgcacagcgcctggagttggctgttgccactggtgcaatccaatccaatgtccctgaggcaatacgcaactgctttgcagtctttcgtacttttgcttggaacgacaggatgcccacgggaacttttcttggatctatatcgcttcatcccaacattaacccgtacactgctcacctctctgggatgtgggccgggtggggcggtagttttgaggtccggctatcgatctctggttctggcgtgttcgctgggcgtatcattgcttctgtcataccaccaggggttgatccctcgtccatcagggacccaggcgtgttgcctcacgctttcgttgatgctcgcatcactgagccagtttctttcatgatccctgatgttagagcagtggactaccataggatggacggtgctgagcccacttgctcattaggattttgggtttaccaaccattgctcaacccgttttccaccaccgccgtttcaacatgttgggtgtcagtagagactaaaccaggcggtgattttgatttctgcctactaaggccaccaggtcaacagatggagaat

SEQ ID NO: 14839 - DNA, 18 bp, unidentified
  source 1..18: mol_type = other DNA
  misc_feature 1..18: note = Synthetic
atgttccaaattacgtga

SEQ ID NO: 14840 - DNA, 63 bp, unidentified; identical to SEQ ID NO: 7630
  source 1..63: mol_type = other DNA
  misc_feature 1..63: note = Synthetic

SEQ ID NO: 14841 - DNA, 21 bp, unidentified
  source 1..21: mol_type = other DNA
  misc_feature 1..21: note = Synthetic
atgtatgtgcctcggagttaa

SEQ ID NO: 14842 - DNA, 21 bp, unidentified
  misc_feature 1..21: note = Synthetic
  source 1..21: mol_type = other DNA
atgtatgtgcctcggagttaa

SEQ ID NO: 14843 - DNA, 156 bp, unidentified; identical to SEQ ID NO: 7634
  misc_feature 1..156: note = Synthetic
  source 1..156: mol_type = other DNA

SEQ ID NO: 14844 - DNA, 588 bp, unidentified
  source 1..588: mol_type = other DNA
  misc_feature 1..588: note = Synthetic
atgcccgctacttcctactcacctattctcagtgcggggaactcgacccctggaaagttagcaatcaccttggagaacttcgaggagaatgcatcgtcgcacgagaagcccatgctgatggtggaactcatctacacgcttttgtcgacttcggcaggaaattcagatctcgtcgtaccagcatctttgatgtcgacaatcatcacccaaatgtttcagctacgcactctacaccacgtgagggcttcgactatgcgtgcaaagatggtgacattgtggcagggggactggaacgaccagaacagagcgatcgtgttgtccgatcaactggatggcatgatatcgtcgctgcaacaagtcgagaggagtttttcgaactgcttatggcacatgatccacgaactctatgtacctgctttgcccagctcagcaaatatgccgactggcgctatcgcgaagatccagagccgtatcgatccccagactccgtggttattgatgcatcagcgtttcctgaacttgaggaatggccacacagggcgcttcaacctgcacacgtacgtcgtgggaggagaggtcagagcctag

SEQ ID NO: 14845 - DNA, 813 bp, unidentified
  misc_feature 1..813: note = Synthetic
  source 1..813: mol_type = other DNA
ctggctctaggagagatggcgtgcctccgggtgttcctggcggtgttcgcgctgtgcggaagcgtgcactcggcgcaatggatcggcgagcgcgacttctgcatggcccacgcgcaggacgtcttcgcgcggctgcaagtgtggatgcgcatcgaccggaacgtgaccgctgcggataacaactcggcctgtgcgctggcgatagagacgccgccaagcaacttcgacgcggacgtctacgtcgccgcggccggcataaacgtcagcgtgtccgcgatcaactgcggcttcttcagcatgcgccaggtagagacaacgtacgacacggcacgccggcagatgtacgtgtacatggacacctgggacccttgggtgctcgacgacccccagccgctcttcagccaggagtacgaaaacgaaacgctgccgtacctgctggaggttctggagctagcgaggctgtacattcgcgtgggctgcacggtgcccggagagcagccctttgaggtgatcacggggatcgactaccctcacaccagcatggagtttctccagcacgttctacggccaaaccgccggttcgctccagcgaagctgcacatggacctcgaagtggactaccggtgcgtgagcgccgtttacgtgaaggcgttcctgcaggacgcctgtagcgcccgcaaggcgcggacgccgctctacttcgcggggcatggctccaatcatccagatcgccggccaaaaaacccagtaccgcgccctcagcatgtatcgtcgccgatgtccaggaagtgcctcatgcagacggcgcgctga

SEQ ID NO: 14846 - DNA, 21 bp, unidentified
  misc_feature 1..21: note = Synthetic
  source 1..21: mol_type = other DNA
atgtatgtgcctcggagttaa

SEQ ID NO: 14847 - DNA, 21 bp, unidentified
  misc_feature 1..21: note = Synthetic
  source 1..21: mol_type = other DNA
atgtatgtgcctcggagttaa

SEQ ID NO: 14848 - DNA, 408 bp, unidentified
  source 1..408: mol_type = other DNA
  misc_feature 1..408: note = Synthetic
atcttttgcaaagctttgcacggcgtcaccaagaaaaaacacaaaaagactctattttttattagtatccttctcctgtcatttttactcatacagatcccctatatagctatccttatatctgaaatcgcatttctctacatgccacagaacacctgcttttggttagcccgtgcagagatattgcagttaatcattcgattaatgccacaggtacattgtttctctaatccgttagtctacgcattcactggaggcgaactaagaaaccgatttaccacctgtttccaatgtccattttttcccaaaagactatgtagtacacagaatcgcaaacagtcagacgtctccgaacatgatcagaactcgccatcagaatcgtcagtggatgaaaacgaacccccttaa

SEQ ID NO: 14849 - DNA, 186 bp, unidentified
  misc_feature 1..186: note = Synthetic
  source 1..186: mol_type = other DNA
atgcttagggcggccagacgtgcagcttcgggcgccagcgccggcaggtcccgcaggcaagcagccgctgtcgcagcggcgactattgccgacatggcccaatcgcgaagaggcaatgtatactgggtgcgtgacgctgccaccggtcaacgtgtacccgtgcgcacccgtccccctcgcacttag

SEQ ID NO: 14850 - DNA, 1026 bp, unidentified
  misc_feature 1..1026: note = Synthetic
  source 1..1026: mol_type = other DNA
atggatatcttcagggaaatcgcatcttctatgaaaggagagaatgtattcatttctccaccgtcaatctcgtcagtattgacaatactgtattatggagctaatggatccactgctgaacagctatcaaaatatgtagaaaaggaggcggacaagaataaggatgatatctcattcaagtccatgaataaagtatatgggcgatattctgcagtgtttaaagattcctttttgagaaaaattggagataatttccaaactgttgacttcactgattgtcgcactgtagatgcgatcaacaagtgtgttgatatcttcactgaggggaaaattaatccactattggatgaaccattgtctccagatacctgtctcctagcaattagtgccgtatactttaaagcaaaatggttgatgccatttgaaaaggaatttaccagtgattatcccttttacgtatctccaacggaaatggtagatgtaagtatgatgtctatgtacggcgaggcatttaatcacgcatctgtaaaagaatcattcggcaacttttcaatcatagaactgccatatgttggagatactagtatggtggtaattcttccagacaatattgatggactagaatccatagaacaaaatctaacagatacaaattttaagaaatggtgtgactctatggatgctatgtttatcgatgtgcacattcccaagtttaaggtaacaggctcgtataatctggtggatgcgctagtaaagttgggactgacagaggtgttcggttcaactggagattatagcaatatgtgtaattcagatgtgagtgtcgacgctatgatccacaaaacgtatatagatgtcaatgaagagtatacagaagcagctgcagcaacttgtgcgctggtggcagactgtgcatcaacagttacaaatgagttctgtgcagatcatccgttcatctatgtgattaggcatgtcgatggcaaaattcttttcgttggtagatattgctctccaacaactaattaa

SEQ ID NO: 14851 - DNA, 45 bp, unidentified; identical to SEQ ID NO: 7518
  misc_feature 1..45: note = Synthetic
  source 1..45: mol_type = other DNA

SEQ ID NO: 14852 - DNA, 12 bp, unidentified
  misc_feature 1..12: note = Synthetic
  source 1..12: mol_type = other DNA
atgaaaagttaa

SEQ ID NO: 14853 - DNA, 2316 bp, unidentified
  source 1..2316: mol_type = other DNA
  misc_feature 1..2316: note = Synthetic
atgtttgtcattaaacgaaatggatacaaggaaaatgtcatgtttgataaaatcacgtctcgtattagaaaattatgttatggcttaaacacggatcatatagatcctattaaaatagctatgaaggttattcaaggaatatataatggagtaacaacggtagaattggacactctggcagccgaaatagcagccacttgtactacacaacatccggattatgccattctagccgccagaatagccgtatcaaatctacacaaggaaacaaaaaaactatttagtgaagtgatggaggatttattcaactatgttaatcctaaaaatgggaaacattctccgattatttcaagtatcaccatggatatagttaacaaatataaggataaactcaactcggttattatttacgaacgagacttttcatacaactattttggttttaaaactttggaaaaatcctacttgttgaaaataaacaacaagatcgttgaaagacctcagcacatgttaatgcgtgtcgcagtaggaattcatcaatgggatatagactcagctattgagacgtacaatctactttctgaaaaatggtttacgcacgcttctcctaccttatttaatgcgggaactagtcgtcaccaaatgtctagctgttttctacttaacatgatcgatgatagcatagagggtatctatgacacgttaaaacgatgcgcattaatctctaaaatggcagggggaataggtctatcaattagtaatattcgtgccagtggaagctatatctccggtaccaatggtatatcaaacggtattattccaatgttgagagtttataataacaccgctagatacatagatcagggaggaaacaaacggcctggagttatggccatatacttggaaccgtggcattctgatattatggcgttcctcgatcttaaaaagaatacaggaaacgaggaacatagaaccagagatctatttatagctctttggattcctgatctctttatgaaacgagtgaaggatgacggagagtggtcgttgatgtgtccggatgaatgtcctggattggacaatgtttggggagacgagttcgaacgattgtatacactatacgaaagagaaaggagatacaaatctataataaaggctcgagtcgtctggaaagcgattatagaatctcagattgaaactggtactccattcattctttataaggatgcgtgtaacaaaaagagtaatcaacaaaatttaggaactatcaagtgtagtaatctttgcactgagataatacaatatgcggatgctaatgaggtagccgtttgtaatctggcatctgttgccttgaacatgtttgtaatagatgggcgatttgattttctcaaactgaaggatgtggtcaaagtaattgtcagaaatctcaataaaattatagatattaattattatcctattccagaagctgaaatctctaataagagacatagacctatcggtattggtgttcaaggattagcggacgcgtttattctcttaaattatccatttgatagcctggaagcacaagatctaaataagaagatcttcgaaaccatttattacggtgcattagaggcgagttgtgaactagctgagaaggaaggaccatacgatacatatgtaggatcgtacgccagtaacggtattctacaatatgatctttggaatgttgtaccgtcggatctttggaattgggaacctctaaaagataaaatcagaacatacggtcttagaaatagtttattggtggcacctatgccgactgcatcaactgctcaaattttgggaaataatgagtcggtggaaccgtataccagtaatatttacactcggagagtattgtctggagaatttcaagtagttaatccgcatctccttagagttttaaccgagagaaaattatggaatgatgagatcaagaataggattatggcagatggtggatccattcagaatacaaaccttccagaagatattaagcgagtttataaaactatttgggaaattccacaaaagacgatcataaaaatggctgcagacaggggagccttcatcgatcaaagtcaatctatgaatatccatatagcagatccgagttattccaaactaacgagtatgcatttttacggatggagtctcggtctaaaaacgggaatgtactatctacgtacgaaacccgcatccgctcccattcaattcacattggacaaggataaaataaaaccaccggtggtttgtgattccgaaatctgtacatcatgcagtggttaa

SEQ ID NO: 14854 - DNA, 18 bp, unidentified
  source 1..18: mol_type = other DNA
  misc_feature 1..18: note = Synthetic
atgccagggacatactaa

SEQ ID NO: 14855 - DNA, 18 bp, unidentified
  misc_feature 1..18: note = Synthetic
  source 1..18: mol_type = other DNA
atgccacgggcatactaa

SEQ ID NO: 14856 - DNA, 36 bp, unidentified
  misc_feature 1..36: note = Synthetic
  source 1..36: mol_type = other DNA
atttttccttcagtaaaaatagccaccttggtttag

SEQ ID NO: 14857 - DNA, 24 bp, unidentified
  misc_feature 1..24: note = Synthetic
  source 1..24: mol_type = other DNA
atgaacgccttgcaaacgaactaa

SEQ ID NO: 14858 - DNA, 336 bp, unidentified
  source 1..336: mol_type = other DNA
  misc_feature 1..336: note = Synthetic
atgccctacatccttccatcgcgcctacccccggctatcgtggctacacctaccgccccagaagacgagcgactacccgacgccgaaccaccactggaacccgccgccgccgtcgccgtcgccagcccgtgctggccccgatttccgtgcgcagggtggctcgcgaaggaggcaggaccctggtgctgccaacagcgcgctaccaccccagcatcgtttaaaagccggtctttgtggttcttgcagatatggccctcacctgccgcctccgtttcccggtgccgggattccgaggaagaatgcaccgtaggaggggcatggccggccacggcctga

SEQ ID NO: 14859 - DNA, 24 bp, unidentified
  source 1..24: mol_type = other DNA
  misc_feature 1..24: note = Synthetic
atgtattgtctaaagccgttatag

SEQ ID NO: 14860 - DNA, 24 bp, unidentified
  source 1..24: mol_type = other DNA
  misc_feature 1..24: note = Synthetic
atgtattgtctaaagccgttatag

SEQ ID NO: 14861 - DNA, 24 bp, unidentified
  misc_feature 1..24: note = Synthetic
  source 1..24: mol_type = other DNA
atgtattgtctaaagccgttatag

SEQ ID NO: 14862 - DNA, 33 bp, unidentified; identical to SEQ ID NO: 6648
  misc_feature 1..33: note = Synthetic
  source 1..33: mol_type = other DNA

SEQ ID NO: 14863 - DNA, 33 bp, unidentified; identical to SEQ ID NO: 6648
  misc_feature 1..33: note = Synthetic
  source 1..33: mol_type = other DNA

SEQ ID NO: 14864 - DNA, 33 bp, unidentified; identical to SEQ ID NO: 6648
  misc_feature 1..33: note = Synthetic
  source 1..33: mol_type = other DNA

SEQ ID NO: 14865 - DNA, 246 bp, unidentified
  misc_feature 1..246: note = Synthetic
  source 1..246: mol_type = other DNA
atgggggcgggaagtagcgcgttaacgaccgccagggcctcctgcagccgcggctccgcctccgagggcggaacggccgcgcggatcatctcatattgttcctcggggcgcgctccccagccacatatagccccgagaagagaagccatcgcgggcgggtactggcccttgggcgcgcggacgcaatggggcaggaagacgggaaccgcggggagaggcgggcggccgggactcccgtggaggtga

SEQ ID NO: 14866 - DNA, 66 bp, unidentified; identical to SEQ ID NO: 7656
  misc_feature 1..66: note = Synthetic
  source 1..66: mol_type = other DNA

SEQ ID NO: 14867 - DNA, 894 bp, unidentified
  source 1..894: mol_type = other DNA
  misc_feature 1..894: note = Synthetic
ctgtctttcagaccttgttggacatcccgtacaatcaagatgttcctgtatgttgtttgcagtctggcggtttgctttcgaggactattaagcctttctctgcaatcgtctccaaatttgtgccctggagtgatttcaacgccttacacgttgacctgtccgtctaatacatccttgccaacatcctggtattgcaacgatactcggcttctccgactgacgcagcaaacaatcactgttgtcacccttatctgcaattttagttgtgtgggacaatctgggcatcgacacagcctttggattacatggtatccacaacctgtcttacaaaccttgtgtggacaaccatcaaacacagtcacttgtggtcagcatgttactttgtattgttctacctctggaaataatgttaccgtttggcatctaccaaacggacgaaatgaaaccgtgtcacaaactaaatactataattttacgctgatggaccaaacggaggggtgttatgcttgttctgacgggctgtcgtctcgcctgtcaaatcgtctatgtttttcggcgcgttgtgccaatataactctagaaactaatactgtatctgtcagcagtactacaggctttagaacattcagtactaatagcgatgcaaccacacatgatatacttgtaatgaaagaagccaaatctacaaatctacatattcaagtgcattttcttgtatttatgacactcgtagctctgataggaaccatgtgtggtatcttaggaactattatctttgcccattgtcaaaaacaaagtgactcaaacaaaacagtgccacaacaattgcgggattattattccctacacgatttgtgcacggaagactatacgcaaccagtggattggtactga

SEQ ID NO: 14868 - DNA, 879 bp, unidentified
  source 1..879: mol_type = other DNA
  misc_feature 1..879: note = Synthetic
ctgtctttcagaccttgttggacatcccgtacaatcaagatgttcctgtatgttgtttgcagtctggcggtttgctttcgaggactattaagcctttctctgcaatcgtctccaaatctctgccctggagtgatttcaacgccttacacgttgacctgtccgtctaatacatccttgccaacatcctggtattgcaacgatactcggcttttacgagtgacgcagggaacattgactgttgacacccttatctgcaattttagttgtgtgggacaatctgggcatcgatacagcctttggattacatggtatgcacaacctgtcttacaaaccttctgtggacaaccatcaaacacagtcacttgtggtcagcatgttactttgtattgttctacctctggaaataatgttaccgtttggcatctaccaaacggacaaaatgaaaccgtgtcacaaactaaatactataattttacgctcatgaaccaaactgaggggtgttatgcttgttctaacgggctgtcgtctcgcctgtcaaatcgtctatgtttttcggcgcgttgtgccaatataactccagaaactcatactgtatctgtcagcagtactacaggctttagaacatttgcaaccgcacctactctatttgtaatgaaagaagtaaaatctacatatctatatattcaagagcatttgcttgtatttatgacactcgtagctctgataggaaccatgtgtggtatcttaggaactattatctttgcccattgtcaaaaacaacgtgactcaaacaaaacagtgccacaacaattgcaggattattattccctacacgatttgtgcacggaagactatacgcaaccagtggattggtactga

SEQ ID NO: 14869 - DNA, 2421 bp, unidentified
  misc_feature 1..2421: note = Synthetic
  source 1..2421: mol_type = other DNA
ttgaggccgcgtgtggcccctggactgtgtttctgtaaggtcatgtctgtccggacattttgtcaggttcacttgggagctgtcccaccagagcgacgcgggtctcaggtgtctgcgggacaattgtcggattttgatatgtgtgcccaatctctcatagactttctaaaggttagggtcgggtgggacgtgcgggccaatgccatggcggggcggctgtggcaccaaattatggaggctaggtgcccagcgactctcaagcagtatcttgggatttttcgaggcgtgttgggacatcgggtggaatcgtttattcaaaagaacattgatgccttggaagatatgttgtgcgcctacagacggtccaaagcttacgaggacacacttaactgtggctacctatcggccgtgaggttgtatgatacttacgtcctaaggaccatggggacagagcctgtctatgaaagcgtggcgcaaatgtttatgagggtttccgtgtttgttgcctgtcagtgcttagagcatgaatgcctgtattggttggcgcgggaccttattgaggacgctaagtctgtatctgagatggctatagtggagtacgtttttggctacctcgctgcgcagcacgtgtgctgcgccacgccaatactgcgctcagctggagtcgaaggcggacaactcgccagctgttttattctgcagccctccatgatgaatgagccgggtactttggacgccctgtaccacgatatgagtccgttgctggccagtaagtcaggcgtgggtctggatgttacgtcattctcccaccaaaagaacatagccagttgcctcaaactggtggatgcccaggttcattatttcaatgacaataacatcaggcccgttggcgcgagcgcatacatggaactctggcacagtcaaatctgtgattttttgaacgccaaactaccggagaatcccgacagatgtcacagtctctttcagggcgtgtgcatcccaacattgtttttcaggatgtatgaaaaggacccatccaagttatggtatttgttcgatccagccaccgcccccaatttgattaagctatacggtgctgcgttcgataacgaatacgagcgcctggtgcgggctggaaagtacgttagttgcatgccgttgaagtctatgatgttcactcttatccacaccatcataaagacaggctcaccgtacgtgcttttaaaagaagcgctcaatgaacaccactggaccgacactcagggcatggccattaactgctcaaacttgtgtgcagagatagtccaactgccaggaagaaacacttcggtgtgcaacctggcaaatatctgccttccaaagtgtctgagaactgttgaaagcgcgagggttggcaccacggacgccaacaggccgtttttttgttttgaggccttgggcgacgcagtaagggtggcagtcctcgtcatcaacgcctgcattctgggtggttcccatccaacaccgggggtcgagcgaggtcaaaaggagaggtctatggggattggtgttcaggggttggcggatgtgtttgcggaattggggtacgggtacctcgatgctgagagcgctgagttagacaagaatatattccagtctatgtactacaccgcggtggagactagtcacaaccttgttttggagggccagggtgtcccatttcatggctgggaggtcagtaacttcgccaagggcaggtttcattggcaaacatgggagggggaggatgcttcgtttgtaccacgccatcgctgggacgcgttgggaaagagcattgccgagcatggcatattcaattctcagtttctggcggtgatgccgacggctgggacctcgcaagtaactggctatgccgagtccgtgtaccccttttttgctaatatatcttccaaggtcaccaataaagaagaggtgttgaggcccaatgtgactttttttaagaaggttctccccgacgaccttcgggtggttagacagtatggtggggacgtttccacgttccccaagcatcacagggaaagatatagggtattcctaacagcctttgattactgtccatttaagctactggatagggctcgtgccagggcgccgtttgtagaccagagccagtccatgagcttcttcctcaaggaggacagagtcaggaatgcgagctatcttagggacctgctgctacatggatacaggcttggtctaaaaaccctcatgtactactgtagggttcagaagcaatctagtctgacggctcttcagtgcctggcagatccagggtcaccgcctcactctgggatgaaacaagatggggcgtggttacccggacctaaaaacccggaggaggagtcctgcgcggcagaccccgagtgcctggtctgtcagtag

SEQ ID NO: 14870 - DNA, 2421 bp, unidentified
  misc_feature 1..2421: note = Synthetic
  source 1..2421: mol_type = other DNA
ttgaggccgcgtgtggcccctggactgtgtttctgtaaggtcatgtctgtccggacattttgtcaggttcacttgggagctgtcccaccagagcgacgcgggtctcaggtgtctgcgggacaattgtcggattttgatatgtgtgcccaatctctcatagactttctaaaggttagggtcgggtgggacgtgcgggccaatgccatggcggggcggctgtggcaccaaattatggaggctaggtgcccagcgactctcaagcagtatcttgggatttttcgaggcgtgttgggacatcgggtggaatcgtttattcaaaagaacattgatgccttggaagatatgttgtgcgcctacagacggtccaaagcttacgaggacacacttaactgtggctacctatcggccgtgaggttgtatgatacttacgtcctaaggaccatggggacagagcctgtctatgaaagcgtggcgcaaatgtttatgagggtttccgtgtttgttgcctgtcagtgcttagagcatgaatgcctgtattggttggcgcgggaccttattgaggacgctaagtctgtatctgagatggctatagtggagtacgtttttggctacctcgctgcgcagcacgtgtgctgcgccacgccaatactgcgctcagctggagtcgaaggcggacaactcgccagctgttttattctgcagccctccatgatgaatgagtcgggtactttggacgccctgtaccacgatatgagtccgttgctggccagtaagtcaggcgtgggtctggatgttacgtcattctcccaccaaaagaacatagccagttgcctcaaactggtggatgcccaggttcattatttcaatgacaataacatcaggcccgttggcgcgagcgcatacatggaactctggcacagtcaaatctgtgattttttgaacgccaaactaccggagaatcccgacagatgtcacagtctctttcagggcgtgtgcatcccaacattgtttttcaggatgtatgaaaaggacccatccaagttatggtatttgttcgatccagccaccgcccccaatttgattaagctatacggtgctgcgttcgataacgaatacgagcgcctggtgcgggctggaaagtacgttagttgcatgccgttgaagtctatgatgttcactcttatccacaccatcataaagacaggctcaccgtacgtgcttttaaaagaagcgctcaatgaacaccactggaccgacactcagggcatggccattaactgctcaaacttgtgtgcagagatagtccaactgccaggaagaaacacttcggtgtgcaacctggcaaatatctgccttccaaagtgtctgagaactgttgaaagcgcgagggttggcaccacggacgccaacaggccgtttttttgttttgaggccttgggcgacgcagtaagggtggcagtcctcgtcatcaacgcctgcattctgggtggttcccatccaacaccgggggtcgagcgaggtcaaaaggagaggtctatggggattggtgttcaggggttggcggatgtgtttgcggaattggggtacgggtacctcgatgctgagagcgctgagttagacaagaatatattccagtctatgtactacaccgcggtggagactagtcacaaccttgttttggagggccagggtgtcccatttcatggctgggaggtcagtaacttcgccaagggcaggtttcattggcaaacatgggagggggaggatgcttcgtttgtaccacgccatcgctgggacgcgttgggaaagagcattgccgagcatggcatattcaattctcagtttctggcggtgatgccgacggctgggacctcgcaagtaactggctatgccgagtccgtgtaccccttttttgctaatatatcttccaaggtcaccaataaagaagaggtgttgaggcccaatgtgactttttttaagaaggttctccccgacgaccttcgggtggttagacagtatggtggggacgtttccacgttccccaagcatcacagggaaagatatagggtattcctaacagcctttgattactgtccatttaagctactggatagggctcgtgccagggcgccgtttgtagaccagagccagtccatgagcttcttcctcaaggaggacagagtcaggaatgcgagctatcttagggacctgctgctacatggatacaggcttggtctaaaaaccctcatgtactactgtagggttcagaagcaatctagtctgacggctcttcagtgcctggcagatccagggtcaccgcctcactctgggatgaaacaagatggggcgtggttacccggacctaaaaacccggaggaggagtcctgcgcggcagaccccgagtgcctggtctgtcagtag

SEQ ID NO: 14871 - DNA, 12 bp, unidentified
  misc_feature 1..12: note = Synthetic
  source 1..12: mol_type = other DNA
atgtacgattaa

SEQ ID NO: 14872 - DNA, 1695 bp, unidentified
  misc_feature 1..1695: note = Synthetic
  source 1..1695: mol_type = other DNA
atggatcccaaaagctactactgcaatgaggacctgaggagcgatggtggagaaaaatcaccaggaggagacctctacaagggaatcatcctggtgtcgactgtgatatcccttatcattgctataatctctctcgcattcattatagataacaagattaatatacaatcactcgaccctttgagaggtctggaggatagttacttagtcccaattaaagataagtctgaatctatcagtcaagatatacaggaaggaatattccctcgtctgaacttgatcacagccgcaacaacgactaccattccccggagcatagccatacagacaaaggatctgagtgacttgattatgaataggtgttacccctctgttgtgaataatgacacctcttgtgatgtactagctggagcaatacacagtaatttattctcgcaactggacccgtcgacatactggacatgctcttctgggaccccgaccatgaatcaaacagtgaaattactacctgataactcccagatcccaggttccacgtactcaaccggttgtgttagaataccaacattctcactaggcagtatgatctattcttatagtcacaacgtcatatatgaaggttgcaatgatcattctaaatcctcacagtattggcaattaggctacattagtacaagtaaaactggtgaaccacttcagcaagtcagcaggacactgactctgaataatgggctaaaccgcaaatcctgcagtaccgtggcacaagggagaggcgcatacctgttatgtaccaatgttgtggaagatgagaggaccgattacagtacagagggtattcaagatctgactttggactacatagatatctttggcgcggagaggagctatagatatactaataatgaggttgacctggaccgtccttacgcggcactctaccccagtgttggatcagggacagtttataatgataggatcttattcctggggtatggaggattgatgacaccttacggagatcaagctatgtgccaagctccagaatgtacatctgctacacaagaggggtgtaacagtaaccagctaatagggtatttttcagggaggcagatagtgaactgtattattgagattattacagttgggacagagaaaccaatcattcgtgttaggaccatcccaaattcccaggtgtggctcggtgcagagggtcgtatacagacattaggtggagtactttacctctacattagatcatcagggtggcatgctctggctcagacaggtatcatcttgacgcttgaccctataagaataagttggatagtaaatacaggatattcgagacctgggaacggtccctgctcagcatcgtcacgatgtccagcgcagtgtatcacaggagtttacacagatatctttccgttgtcgcaaaattatggttatttggctacagtcacattgctatccggagtagatcgggtcaacccggtgatatcatatggtacttccactggacgggttgcagatagtcaactaacgagctcaagtcaggtggccgcatacacgacaaccacttgtttcacattcaatcaaaaggggtattgctatcatatcatagagttaagtcctgctactctaggcatattccaaccggtcctagtcgtgaccgagatccccaaaatctgttcataa

SEQ ID NO: 14873 - DNA, 786 bp, unidentified
  misc_feature 1..786: note = Synthetic
  source 1..786: mol_type = other DNA
ctgtgctcccaaagtttaagaaaaatgagacacctgcacctcctgtcttcaactgtgcctattgacatggccgcattattgctggaggactatgtaaatacaatattggaggacgaactgcatttatctccgtttgagctgggacccacacttcaggacctatatgatttggaggtaaatgcccaggagaacgacccaaacgaagaggctgtgaatttaatatttccagaatctatgattcttcaggctgacatagccagcgaagctgtacctacttcagtttatacaccgactctgccgcctatacctaaattggaagaggaggataagctagaccttcggtgttatgaggaaggttttcctcccagcgattcagaggacgaacggggtgagcagagcgtggctataatctcagactatgcgtgtgtggttgtggaaaatcattttgtgttggacaatcctgaggtgccagggcaaggctgtaaatcctgtcaatatcaccgggaacagaccggagacccaaatgcttcctgcgctctgtgttacatgaaaatgagcttcagctttatttacagtccggtgtcagaggatgagtcatcacccttagaagaagaccacccgtctccccctgatcttacaaatgacacgcccctgcaagtgcgcaaacccaccccggttagaccgagtggcgagaggcgagcggctgtttacaaaattgaggatttgttgcaggacgtgggtgggaatgaacctttgaacctgagcttgaaacgccccaggaactag

SEQ ID NO: 14874 - DNA, 600 bp, unidentified
  misc_feature 1..600: note = Synthetic
  source 1..600: mol_type = other DNA
ctgtgctcccaaagtttaagaaaaatgagacacctgcacctcctgtcttcaactgtgcctattgacatggccgcattattgctggaggactatgtaaatacaatattggaggacgaactgcatttatctccgtttgagctgggacccacacttcaggacctatatgatttggaggtaaatgcccaggagaacgacccaaacgaagaggctgtgaatttaatatttccagaatctatgattcttcaggctgacatagccagcgaagctgtacctacttcagtttatacaccgactctgccgcctatacctaaattggaagaggaggataagctagaccttcggtgttatgaggaaggttttcctcccagcgattcagaggacgaacggggtccggtgtcagaggatgagtcatcacccttagaagaagaccacccgtctccccctgatcttacaaatgacacgcccctgcaagtgcgcaaacccaccccggttagaccgagtggcgagaggcgagcggctgtttacaaaattgaggatttgttgcaggacgtgggtgggaatgaacctttgaacctgagcttgaaacgccccaggaactag

SEQ ID NO: 14875 - DNA, 15 bp, unidentified
  misc_feature 1..15: note = Synthetic
  source 1..15: mol_type = other DNA
ttgctgttcctttag

SEQ ID NO: 14876 - DNA, 42 bp, unidentified; identical to SEQ ID NO: 7670
  misc_feature 1..42: note = Synthetic
  source 1..42: mol_type = other DNA

SEQ ID NO: 14877 - DNA, 15 bp, unidentified
  misc_feature 1..15: note = Synthetic
  source 1..15: mol_type = other DNA
atggtgaggaaatag

SEQ ID NO: 14878 - DNA, 15 bp, unidentified
  misc_feature 1..15: note = Synthetic
  source 1..15: mol_type = other DNA
atggtgaggaaatag

SEQ ID NO: 14879 - DNA, 93 bp, unidentified
  misc_feature 1..93: note = Synthetic
  source 1..93: mol_type = other DNA
aagaaaacaaacatcatatgggaatcgatgttattatcaaagtcaccaagcaagaccaaacaccgaccaatgataagatttgtcaatcagtaa

SEQ ID NO: 14880 - DNA, 93 bp, unidentified; identical to SEQ ID NO: 14879
  misc_feature 1..93: note = Synthetic
  source 1..93: mol_type = other DNA

SEQ ID NO: 14881 - DNA, 33 bp, unidentified; identical to SEQ ID NO: 1
  source 1..33: mol_type = other DNA
  misc_feature 1..33: note = Synthetic

SEQ ID NO: 14882 - DNA, 1308 bp, unidentified
  misc_feature 1..1308: note = Synthetic
  source 1..1308: mol_type = other DNA
attacaacgaccaacaaaatggcaactatggaagagttacagagagaaattaatgcccatgagggacagcttgtggtggctaggcaaaaggtgaaggacgcagaaaggcaatacgaaaaagaccctgatgatctcaataagagggcactacatgaccgtgaaagtgttgctgcctctatccagtcaaagatagatgagttaaagagacagcttgcggatcgggttgcaacaggaaagacaattgggcaggacagagatccaacaggggttgagccaggagatcacctcaaagaaaggtctatgttgagttatggcaatgtcttggatcttaacaatcttgacattgaggagcccacaggccaaactgctgattggctgacaattattgtctatctgacatcatttgttatcccaatcatccttaaggcactgtacatgttaacaacaagaggcaggcaaactacaaaggataacaaagggatgagaattaggtttaaggatgatagctcttacgaggatgtcaatgggattcaaaagccaaagcacctttacatttcaatgcccaatgcccagtcgagcatgaaggcagaggaaatcacaccagggcgattccggacagcagtttgcgggctttacccagctcaagttaaggctaggaatatggttagtcctgtaatgagtgtgattggctttctggcattggcacgagattggactaacagaattcaggattggctgggtgctccatgtaaacttctcccagacttgtcaacacagagtcttcatgctagtccacccacaaatgctgattacatagctcagcgacaaggcctgttggcaagcatggagacaaaagagtcaaagggcataagagaccatgctagggatgctgggtgtagtctggtagaccatcttgactcaccgtcatcgatctgggtgtttgctggtgcacctgatcgatgtccgccaacatgcctctttatcgctgggatggcagagcttggggcattcttctcaatcttacaagacatgagaaataccatcatggcttctaagactgttgggacatcagaagaaaagctaagaaagaagtcatctttttaccagtcatacttgaggaggacacaatccatggggattcaactggatcaacgtatcatcgttatgttcatggttgcttggggaaaagaggcagttgacaatttccatcttggggatgatatggacccagagctcagaaaccttgcacaactgctgattgaccagaaggtgaaagaaatttctaaccaagagcccttaaagctctaa

SEQ ID NO: 14883 - DNA, 75 bp, unidentified; identical to SEQ ID NO: 7677
  misc_feature 1..75: note = Synthetic
  source 1..75: mol_type = other DNA

SEQ ID NO: 14884 - DNA, 72 bp, unidentified; identical to SEQ ID NO: 7678
  source 1..72: mol_type = other DNA
  misc_feature 1..72: note = Synthetic

SEQ ID NO: 14885 - DNA, 30 bp, unidentified; identical to SEQ ID NO: 7679
  misc_feature 1..30: note = Synthetic
  source 1..30: mol_type = other DNA

SEQ ID NO: 14886 - DNA, 249 bp, unidentified
  source 1..249: mol_type = other DNA
  misc_feature 1..249: note = Synthetic
ctgttccacactacgcagtccgaagagggatgtagtcctttaatgccaaatctagctgctgcggttccctgcagaccgttcgtcaacctagcgcaggagacgggaacgacaaacctgctggtagcgggcagtcgaccgacgaataccggcgtgagaaattttgtgataaatttaaccgtcagcgaatcctcttcgtccagacgcaccgcaaacagaattttgctgcggtctttcacgagcctgttgtaa

SEQ ID NO: 14887 - DNA, 210 bp, unidentified
  source 1..210: mol_type = other DNA
  misc_feature 1..210: note = Synthetic
ctggacaagatcttcgaggtcacgggcgtgacgcgcaacctgcgtccgcagaccgtgaagaactacgcgaagaacaacagcaaccagctcacctgggagaacttcctcgcgcacatgcgcgcgcgcaagcgcgccgcgcagatcccggagttcggccacgagtacgtgttctcgcccgcgcgcttcgcggcgtgctcgctcgacctttga

SEQ ID NO: 14888 - DNA, 129 bp, unidentified
  source 1..129: mol_type = other DNA
  misc_feature 1..129: note = Synthetic
ctgcgggacatgctcaaagtcaacccgtgcgtcaccgtgcagatccgcgaggggagttgcgcgcgcccctgcaggcggcccagctcctcggagccttgctgcgtcgtggcgcgcacgttcgtgcagtag

SEQ ID NO: 14889 - DNA, 114 bp, unidentified
  source 1..114: mol_type = other DNA
  misc_feature 1..114: note = Synthetic
atgtctgggatagtaaaatctatcatattgagcggaccatctggtttaggaaagacagccatagccaaaagactatgggaatatatttggatttgtggtgtcccataccactag

SEQ ID NO: 14890 - DNA, 48 bp, unidentified; identical to SEQ ID NO: 7686
  source 1..48: mol_type = other DNA
  misc_feature 1..48: note = Synthetic

SEQ ID NO: 14891 - DNA, 36 bp, unidentified; identical to SEQ ID NO: 7687
  source 1..36: mol_type = other DNA
  misc_feature 1..36: note = Synthetic

SEQ ID NO: 14892 - DNA, 1137 bp, unidentified
  source 1..1137: mol_type = other DNA
  misc_feature 1..1137: note = Synthetic
atgagctgcaccccgtgtcgcccacaaaaaaggctaacaaggccaagaagtcaagttccccgggtacaaactctggcaacagaagtaaaaaaaggaggggtagaagtactagccgcagtaccactgtcagaagaaacagaatttaaagtggaactatttgtaaagccagtaattggaaatacaacagctgctcaggatgggcgtgagcccacccctcattactggtcaattagctctgccattcatgacaaggaaagcggttcaagtatcaaagttgaagaaactccagatgctgacacaactgtatgttacagcctggcagaaattgctccccctgatataccaaatcaagttagtgagtgtgacatgaaagtatgggagctgtacagaatggaaacagagttgcttgttgtacctctagttaatgctctaggaaacaccaatggtgttgtacatggtctggctggaacccagttgtatttttgggctgttgggggacagccacttgatgtagttggtgtaacacccacagacaaatataaaggcccaactacctatacaattaatccaccaggagaccctagaacactgcatgtgtacaatagtaatacacccaaagcaaaggttaccagtgagagatattctgttgaatcatgggccccagaccccagtagaaatgacaattgtagatattttggaagagtggtaggtggtgctgcaacacctccagttgtatcatatggtaacaactctactattccactattggatgaaaatggcattggtatactttgcttgcagggaagattgtacattacttgtgcagatatgcttggaacagctaatagtagaatccatacccctatggctaggttttttaggctacattttagacaaagaagggttaagaatccttttacaatgaatgtgctgtataaacaagtgtttaacagacccacagaaactgttgatgcacaggttggtgtaacagaggtgactatggtagaagaaataggcccactgccccccagtatacaaactaccctccccaccagtgtaaatcttactcagcttccacgcactgtaacacttcagtcccaggctcctttgttaaatactcaacaaaattcaaagtga

SEQ ID NO: 14893 - DNA, 393 bp, unidentified
  misc_feature 1..393: note = Synthetic
  source 1..393: mol_type = other DNA
atgactgaccaccacctggacctcgagatggacggccaggcctccgagcagcgcatcctgcaactgcgcgtccgtcagcagcaggagcgggccgccaaggagctcctcgatgccatcaacatccaccagtgcaagaagggcatcttctgccttgtcaaacaggcaaagatcacctacgagctcgtgtccggcggcaagcagcatcgcctcacctatgagctgccccagcagaagcagaagttcacctgcatggtgggcgtcaaccccatagtcatcacccagcagtcgggcgagaccaacggctgcatccactgctcctgcgaaagccccgagtgcatatactccctcctcaagaccctttgcggactccgcgacctcctccccatgaactga

SEQ ID NO: 14894 - DNA, 162 bp, unidentified
  misc_feature 1..162: note = Synthetic
  source 1..162: mol_type = other DNA
atgccatcaacatccaccagtgcaagaagggcatcttctgccttgtcaaacaggcaaagatcacctacgagctcgtgtccggcggcaagcagcatcgcctcacctatgagctgccccagcagaagcagaagttcacctgcatggtgggcgtcaaccccatag

SEQ ID NO: 14895 - DNA, 393 bp, unidentified
  misc_feature 1..393: note = Synthetic
  source 1..393: mol_type = other DNA
atgactgacaaccacctggaccttgagatggacggccaggcctccgagcaacgcatcctgcaactgcgcgtccgtcagcagcaggagcgaaccgccaaggagctccttgatgccatcaacatccaccagtgcaagaaaggcattttttgcctggtcaaacaggcaaaaattacctacgagcttatgtccggcggcaagcagcatcgccttgcctatgagctgccccagcagaagcaaaagttcacctgcatggtgggcgtcaaccccatagtcatcacccagcagacgggcgaaaccagcggctgtatccattgctcctgcgaaagccccgagtgtatctactccctccttaagaccctttgcggacttcgcgacctcctacccataaactaa

SEQ ID NO: 14896 - DNA, 42 bp, unidentified; identical to SEQ ID NO: 7696
  misc_feature 1..42: note = Synthetic
  source 1..42: mol_type = other DNA

SEQ ID NO: 14897 - DNA, 72 bp, unidentified; identical to SEQ ID NO: 7699
  misc_feature 1..72: note = Synthetic
  source 1..72: mol_type = other DNA

SEQ ID NO: 14898 - DNA, 48 bp, unidentified; identical to SEQ ID NO: 7700
  misc_feature 1..48: note = Synthetic
  source 1..48: mol_type = other DNA

SEQ ID NO: 14899 - DNA, 87 bp, unidentified; identical to SEQ ID NO: 7701
  misc_feature 1..87: note = Synthetic
  source 1..87: mol_type = other DNA

SEQ ID NO: 14900 - DNA, 99 bp, unidentified; identical to SEQ ID NO: 7705
  misc_feature 1..99: note = Synthetic
  source 1..99: mol_type = other DNA

SEQ ID NO: 14901 - DNA, 642 bp, unidentified
  source 1..642: mol_type = other DNA
  misc_feature 1..642: note = Synthetic
atgtccttggggtattggggtgttatgggaaattgttttcgacgattatctttgtttggacagccgactcaggcaaagtatgaaatgttgtgctcttccgacgatttagagaccgaagagctgacgttttttctggatatgacgtataaagattttggagtttatcagaatgatattataagtcatcaaaaagacacggaaactatgaaaactctgttaggcttattaccaatgtacaaaaaaactaagctcaggcatacggttatggagcgttgtttatctaattgtcctaaccatgttaaagatgcgctctgtgtagagcttatgaaagctgaaaaaatattacaaacgatggatgtcgtttttatgaaaactttaattggcgaattttccatgtgcaccgaaaatcttaatcagttgcttaacaaattcgctacagatcagtcaacacttagcgatgtcgagaaaataaacagtctcatagagattgatggtgaaaacagcaaacgtcttttagtcgagttggatccgattctccatgaggagacgggattatatcaagcgctgccaaatgttgtgacggaagctccaagtgaaaaggttaaatcgatacgcgttgagtctgaaggtgagagtgtatag

SEQ ID NO: 14902 - DNA, 306 bp, unidentified; identical to SEQ ID NO: 13435
  source 1..306: mol_type = other DNA
  misc_feature 1..306: note = Synthetic

SEQ ID NO: 14903 - DNA, 204 bp, unidentified
  source 1..204: mol_type = other DNA
  misc_feature 1..204: note = Synthetic
ataaagaacagtactcaatcaatagcaatcatgaaacaatatatcgtcctggcatgcatgtgcctgccagtcttcagcaatcatcctcatcctcctcctcgtgtacggaagaagaaaacaaacatcatatgggaatcgatgttattatcaaagtcacaaagcaagaccaaacaccgaccaatgataagatttgccaatccgtaa

SEQ ID NO: 14904 - DNA, 204 bp, unidentified; identical to SEQ ID NO: 14903
  source 1..204: mol_type = other DNA
  misc_feature 1..204: note = Synthetic

SEQ ID NO: 14905 - DNA, 777 bp, unidentified
  misc_feature 1..777: note = Synthetic
  source 1..777: mol_type = other DNA
attgcaccttgccggccacctttgctatctttgctgaagatgatggacccaaactcgacttctgaagatgtaaaatttacacctgacccataccaggtgccttttgtacaagcttttgaccaagctaccagagtctatcaggacctgggagggccatcacaagctcctttgccttgtgtgctgtggccggtgctgccagagcctctgccacaaggccagctcactgcctatcatgtttcagccgctccaactgggtcgtggtttcctgcccctcagcctgctcctgagaatgcttatcaagcttatgcagcacctcagctattcccagtctcagacataacccagaatcaacagactaaccaagccgggggagaagcacctcaacctggagacaattctactgttcaaccagcagcagcagtggtgtttgcttgtcccggggctaaccaaggacaacagctagcagacattggtgctccacagcctgcaccagcggctgccccggcacgacgtacaaggaaaccactacagccagaatcgctggaggaatgtgattctgaactagatataaagcgatacaagaatcgggtggcttccagaaaatgccgggccaagtttaagcatctgctgcagcactaccgtgaggtggcttctgccaaatcatctgaaaatgacaggctgcgcctcctgttgaagcagatgtgcccaagcctggatgttgactccattatcccccggacaccagatgttttacacgaggatctcttaaatttctaa

SEQ ID NO: 14906 - DNA, 777 bp, unidentified
  source 1..777: mol_type = other DNA
  misc_feature 1..777: note = Synthetic
attgcaccttgccggccacctttgctatctttgctgaagatgatggacccaaactcgacttctgaagatgtaaaatttacacctgacccataccaggtgccttttgtacaagcttttgaccaagctaccagagtctatcaggacctgggagggccatcacaagctcctttgccttgtgtgctgtggccggtgctgccagagcctctgccacaaggccagctcactgcctatcatgtttcagccgcaccaactgggtcgtggtttcctgcccctcagcctgctcctgagaatgcttatcaagcttatgcagcacctcagctgttcccagtctcagacataacccagaatcaactgactaaccaagccgggggagaagcacctcaacctggagacaattctactgttcaaccagcagcagcagtggtgttggcttgccccggggctaaccaagaacaacagctagcagacattggtgctccacagcctgcaccagcggctgccccggcacgacgtacaaggaaaccactacagccagaatcgctggaggaatgcgattctgaactagaaataaagcgatacaagaatcgggtggcttccagaaaatgccgggccaagtttaagcatctgctgcagcactaccgtgaggtggcttctgccaaatcatctgaaaatgacaggctgcgcctcctgttgaagcagatgtgcccaagcctggatgttgactccattatcccccggacaccagatgttttacacgaggatctcttaaatttctaa

SEQ ID NO: 14907 - DNA, 777 bp, unidentified
  misc_feature 1..777: note = Synthetic
  source 1..777: mol_type = other DNA
attgcaccttgccggccacctttgctatctttgctgaagatgatggacccaaactcgacttctgaagatgtaaaatttacacctgacccataccaggtgccttttgtacaagcttttgaccaagctaccagagtctatcaggacctgggagggccatcgcaagctcctttgccttgtgtgctgtggccggtgctgccagagcctctgccacaaggccagctaactgcctatcatgtttcaaccgctccgactgggtcgtggttttctgcccctcagcctgctcctgagaatgcttatcaagcttatgcagcacctcagctgttcccagtctccgacataacccagaatcaacagactaaccaagccgggggagaagcacctcaacctggagacaattctactgttcaaacagcagcagcagtggtgtttgcttgccccggggctaaccaaggacaacagctagcagacattggtgttccacagcctgcaccagtggctgccccggcacgacgcacacggaaaccacaacagccagaatcgctggaggaatgcgattctgaactagaaataaagcgatacaagaatcgggtggcttccagaaaatgccgggccaagtttaagcaactgctgcagcactaccgtgaggtggctgctgccaaatcatctgaaaatgacaggctgcgcctcctgttgaagcagatgtgcccaagcctggatgttgactccattatcccccggacaccagatgttttacacgaggatctcttaaatttctaa

SEQ ID NO: 14908 - DNA, 531 bp, unidentified
  source 1..531: mol_type = other DNA
  misc_feature 1..531: note = Synthetic
atggcacgccggctgcccaagcccaccctccaggggaggctggaggcggattttccagacagtcccctgcttcctaaatttcaagagctgaaccagaataatctccccaatgatgtttttcgggaggctcaaagaagttacctggtatttctgacatcccagttctgctacgaagagtacgtgcagaggacttttggggtgcctcggcgccaacgcgccatagacaagaggcagagagccagtgtggctggggctggtgctcatgcacaccttggcgggtcatccgccacccccgtccagcaggctcaggccgccgcatccgctgggaccggggccttggcatcatcagcgccgtccacggccgtagcccagtccgcgaccccctctgtttcttcatctattagcagcctccgggccgcgacttcgggggcgactgccgccgcctccgccgccgcagccgtcgataccgggtcaggtggcgggggacaaccccacgacaccgccccacgcggggcacgtaagaaacagtag

SEQ ID NO: 14909 - DNA, 531 bp, unidentified
  misc_feature 1..531: note = Synthetic
  source 1..531: mol_type = other DNA
atggcacgccggctgcccaagcccaccctccaggggaggctggaggcggattttccagacagtcccctgcttcctaaatttcaagagctgaaccagaataatctccccaatgatgtttttcgggaggctcaaagaagttacctggtatttctgacatcccagttctgctacgaagagtacgtgcagaggacttttggggtgcctcggcgccaacgcgccatagacaagaggcagagagccagtgtggctggggctggtgctcatgcacaccttggcgggtcatccgccacccccgtccagcaggctcaggccgccgcatccgctgggaccggggccttggcatcatcagcgccgtccacggccgtagcccagtccgcgaccccctctgtttcttcatctattagcagcctccgggccgcgacttcgggggcgactgccgccgcctccgccgccgcagctgtcgataccgggtcaggtggcgggggacaaccccaagacaccgccccgcgcggggcacgtaagaaacagtag

SEQ ID NO: 14910 - DNA, 57 bp, unidentified
  misc_feature 1..57: note = Synthetic
  source 1..57: mol_type = other DNA
ataatctccccaatgatgtttttcgggaggctcaaagaagttacctggtatttctga

SEQ ID NO: 14911 - DNA, 57 bp, unidentified; identical to SEQ ID NO: 14910
  source 1..57: mol_type = other DNA
  misc_feature 1..57: note = Synthetic

SEQ ID NO: 14912 - DNA, 531 bp, unidentified
  misc_feature 1..531: note = Synthetic
  source 1..531: mol_type = other DNA
atggcacgccggctgcccaagcccaccctccaggggaggctggaggcggattttccagacagtcccctgcttcctaaatttcaagagctgaaccagaataatctccccaatgatgtttttcgggaggctcaaaggagttacctggtatttctgacgtcccagttctgctacgaagagtacgtgcagaggacttttggggtgcctcggcgccaacgcgccatagacaagaggcagagagccagtgtggctggggctggtgctcatgcacaccttggcgggtcatccgccacccccgtccagcaggctcaggccgccgcatccgctgggaccggggccttggcatcatcagcgccgtccacggccgtagcccagtccgcgaccccctctgtttcttcatctattagcagcctccgggccgcgacttcgggggcgactgccgccgcctccgccgccgcagccgtcgataccgggtcaggtggcgggggacaaccccaagacaccgccccgcgcggggcacgtaagaaacagtag

SEQ ID NO: 14913 - DNA, 57 bp, unidentified
  misc_feature 1..57: note = Synthetic
  source 1..57: mol_type = other DNA
ataatctccccaatgatgtttttcgggaggctcaaaggagttacctggtatttctga

SEQ ID NO: 14914 - DNA, 2499 bp, unidentified
  source 1..2499: mol_type = other DNA
  misc_feature 1..2499: note = Synthetic
atgcccctatcctatcaacacttccggagactactgttgttagacgacgaggcaggtcccctagaagaagaactccctcgcctcgcagacgaaggtctcaatcgccgcgtcgcagaagatctcaatctcgggaatctcaatgttagtattccttggactcataaggtggggaactttactgggctttattcttctactgtacctgtctttaatcctcattggaaaacaccatcttttcctaatatacatttacaccaagacattatcaaaaaatgtgaacagtttgtaggcccactcacagttaatgagaaaagaagattgcaattgattatgcctgccaggttttatccaaaggttaccaaatatttaccattggataagggtattaaaccttattatccagaacatctagttaatcattacttccaaactagacactatttacacactctatggaaggcgggtatattatataagagagaaacaacacatagcgcctcattttgtgggtcaccatattcttgggaacaagatctacagcatggggcagaatctttccaccagcaatcctctgggattctttcccgaccaccagttggatccagccttcagagcaaacaccgcaaatccagattgggacttcaatcccaacaaggacacctggccagacgccaacaaggtaggagctggagcattcgggctgggtttcaccccaccgcacggaggccttttggggtggagccctcaggctcagggcatactacaaactttgccagcaaatccgcctcctgcctccaccaatcgccagtcaggaaggcagcctaccccgctgtctccacctttgagaaacactcatcctcaggccatgcagtggaattccacaaccttccaccaaactctgcaagatcccagagtgagaggcctgtatttccctgctggtggctccagttcaggaacagtaaaccctgttctgactactgcctctcccttatcgtcaatcttctcgaggattggggaccctgcgctgaacatggagaacatcacatcaggattcctaggaccccttctcgtgttacaggcggggtttttcttgttgacaagaatcctcacaataccgcagagtctagactcgtggtggacttctctcaattttctagggggaactaccgtgtgtcttggccaaaattcgcagtccccaacctccaatcactcaccaacctcttgtcctccaacttgtcctggttatcgctggatgtgtctgcggcgttttatcatcttcctcttcatcctgctgctatgcctcatcttcttgttggttcttctggactatcaaggtatgttgcccgtttgtcctctaattccaggatcctcaacaaccagcacgggaccatgccggacctgcatgactactgctcaaggaacctctatgtatccctcctgttgctgtaccaaaccttcggacggaaattgcacctgtattcccatcccatcatcctgggctttcggaaaattcctatgggagtgggcctcagcccgtttctcctggctcagtttactagtgccatttgttcagtggttcgtagggctttcccccactgtttggctttcagttatatggatgatgtggtattgggggccaagtctgtacagcatcttgagtccctttttaccgctgttaccaattttcttttgtctttgggtatacatttaaaccctaacaaaacaaagagatggggttactctctaaattttatgggttatgtcattggatgttatgggtccttgccacaagaacacatcatacaaaaaatcaaagaatgttttagaaaacttcctattaacaggcctattgattggaaagtatgtcaacgaattgtgggtcttttgggttttgctgccccttttacacaatgtggttatcctgcgttgatgcctttgtatgcatgtattcaatctaagcaggctttcactttctcgccaacttacaaggcctttctgtgtaaacaatacctgaacctttaccccgttgcccggcaacggccaggtctgtgccaagtgtttgctgacgcaacccccactggctggggcttggtcatgggccatcagcgcatgcgtggaaccttttcggctcctctgccgatccatactgcggaactcctagccgcttgttttgctcgcagcaggtctggagcaaacattatcgggactgataactctgttgtcctatcccgcaaatatacatcgtttccatggctgctaggctgtgctgccaactggatcctgcgcgggacgtcctttgtttacgtcccgtcggcgctgaatcctgcggacgacccttctcggggtcgcttgggactctctcgtccccttctccgtctgccgttccgaccgaccacggggcgcacctctctttacgcggactccccgtctgtgccttctcatctgccggaccgtgtgcacttcgcttcacctctgcacgtcgcatggagaccaccgtga

SEQ ID NO: 14915 - DNA, 171 bp, unidentified
  source 1..171: mol_type = other DNA
  misc_feature 1..171: note = Synthetic
atctcaatctcgggaatctcaatgttagtattccttggactcataaggtggggaactttactgggctttattcttctactgtacctgtctttaatcctcattggaaaacaccatcttttcctaatatacatttacaccaagacattatcaaaaaatgtgaacagtttgtag

SEQ ID NO: 14916 - DNA, 390 bp, unidentified
  source 1..390: mol_type = other DNA
  misc_feature 1..390: note = Synthetic
atgctggaacgtactccttgcacttattccatcgttgttcctgaggctctaaacgtgcacctagacgacttttcttttgttaattttcttaaaaattgcttgcctgattttctgtccagttatctggaagatatcaccgggtctagccagcatgcttatttcaatcttacatttggcaatgctcactggggaggacttcgctttatctgtaatgtggcttgcccttctcttgttcctggtggtcctatggctaaaaatttcggagaagatatgaatgagtacatacagttactgctaagggaggagcttagggattgcggcagagcaattgatattccacttgttaatctactacaggtgaaccaggagcagaatctgttggaattatga

SEQ ID NO: 14917 - DNA, 114 bp, unidentified; identical to SEQ ID NO: 7726
  source 1..114: mol_type = other DNA
  misc_feature 1..114: note = Synthetic

SEQ ID NO: 14918 - DNA, 114 bp, unidentified; identical to SEQ ID NO: 7727
  source 1..114: mol_type = other DNA
  misc_feature 1..114: note = Synthetic

SEQ ID NO: 14919 - DNA, 114 bp, unidentified; identical to SEQ ID NO: 7727
  source 1..114: mol_type = other DNA
  misc_feature 1..114: note = Synthetic

SEQ ID NO: 14920 - DNA, 1008 bp, unidentified
  misc_feature 1..1008: note = Synthetic
  source 1..1008: mol_type = other DNA
atggcgatatcgactttttcaattggcgatttgggttatcttagaaattttctgcagaatgaatgtaactggttcagaatttgtaaaaaaacattctatcgcgaatatcgcagcgttgcgacatcgtctcctacattctcgttgaataataagcctaagaaattttgcatgcattgcgagattgtaatattcaagcgaagtgaagaatttatgttcagccttgcggtaaatggcatacattttgggcagtttttaaccggaaaaatgaaatttaataagaaagcagttccggaagggctctattactatatattggaattgggaagcataacccctatcgatttgggctttattccgagatataattccgactgtgttacaaacatgcgttgtgttacaccggaggttatttatgaaaattgctctattgtgtgtcccgaagaggcaaatcgcctcacggtaaaagggtccggggacaataaattgactcccttaggtgggtgtggagcatggtgtctgaaaaatggtggcgatctgtatatctatacttttgcactcgcttacgatcttttcctaacttgttatgacaaatccacctttccatctctggcaaaaattatttttgatatgatagcttgcgaatccgaagattgtgtcttttgtaaagatcacaacaaacatgtatcgcaagctggacagattgtagggtgcgtctctaatcaagaaacctgtttttgctacacatcgtgtaagaaaaaaatggctaatattaacaatccggagttaatctctctgctctgtgatcaggaaattaataagatagatattatgtatcccaaaataaaagcatcgttatcactggacattaattcttacgctcatgggtacttcggtgacgacccttatgcgttaaaatgtgttaattggataccagtcaggatcagcgcagctctgagcaggctgattgttttgtcgtgtcctgtgtgtaagcgtgtggtaatggactaa

SEQ ID NO: 14921 - DNA, 3150 bp, unidentified
  misc_feature 1..3150: note = Synthetic
  source 1..3150: mol_type = other DNA
atgagtttgcagtttatcggtctacagcggcgcgatgtggtagccctggtcaactttctgcgccatctcacgcaaaagcccgacgtggatctcgaggcacaccccaagatcctgaaaaaatgcggcgaaaaacgcctgcaccggcgtacggtgctgttcaacgagctcatgctttggttgggatactaccgcgagctgcgtttccacaaccccgacctttcctcggtgctcgaggagttcgaggtgcgttgcgcggccgtggcgcgtcgcggctacacttacccgttcggtgatcgtggtaaggcgcgtgaccacctggctgtgctagaccgtaccgaattcgatacggacgtgcgccacgatgccgagatcgtggagcgcgcgctcgtaagcgcggtcattctggccaagatgtcggtgcgcgagacgctggtcacagccatcggccagacggaacccatcgcctttgtgcacctcaaggatacggaggtgcagcgcattgaagaaaacctggagggtgtgcgccgtaacatgttctgtgcgaaaccgctcgaccttaacctggaccggcacgccaacacggcgctggtcaacgccgtcaacaagctcgtgtacacgggccgtctcatcatgaacgtgcgcaggtcttgggaggagctggagcgcaaatgtctggcgcgcattcaggagcgttgcaagctgctggtcaaggagctgcgcatgtgcctttcctttgattccaactactgtcgcaatatcctcaagcacgccgtggaaaacggcgactcggccgacacgctgctggagctgctcatcgaggactttgacatctacgtggacagcttcccgcagtcggcgcacacctttttgggcgcgcgctcgccgtcgttggagtttgatgatgacgccaatctcctctcgctcggcggcggttcagccttctcgtcggtacccaagaaacatgtccccacgcagccgctggacggctggagctggatcgccagtccctggaagggacacaaaccgttccgcttcgaggcccatggttctctggcaccggccgccgaagcccacgctgcccgttcggcggccgtcggctattacgacgaagaggaaaagcgtcgcgagcggcagaaacgggtggacgacgaggtggtgcagcgtgagaaacagcagctgaaggcttgggaggagaggcagcagaacctgcagcaacgtcagcagcaaccgccgcccccgacacgtaaaccgggcgcctcccggaggctctttggctccagtgccgatgaggacgacgacgacgatgatgatgacgagaaaaacatctttacgcccatcaagaaaccgggaactagcggcaagggcgccgctagtggtggcggtgtttccagcattttcagcggcctgttatcctcgggcagtcagaaaccgaccagcggtcccttgaacatcccgcagcaacaacagcgtcacgcggctttcagtctcgtttccccgcaggtgaccaaggccagcccgggaagggtccgtcgggacagcgcgtgggacgtgaggccgctcacggagaccagaggggatcttttctcgggcgacgaggattccgacagctcggatggctatccccccaaccgtcaagatccgcgtttcaccgacacgctggtggacatcacggataccgagacgagcgccaaaccgcccgtcaccaccgcgtacaagttcgagcaaccgacgttgacgttcggcgccggagttaacgttcctgctggcgccggcgctgccatcctcacgccgacgcctgtcaatccttccacggcccccgctccggccccgacacctaccttcgcgggtacccaaaccccggtcaacggtaactcgccctgggctccgacggcgccgttgcccggggatatgaaccccgccaactggccgcgcgaacgcgcgtgggccctcaagaatcctcacctggcttacaatcccttcaggatgcctacgacttccacggcttctcaaaacaccgtgtccaccacccctcggaggccgtcgactccacgcgccgcggtgacacaaacagcgtctcgggacgccgctgatgaggtttgggctttaagggaccaaactgcagagtcaccggtcgaagacagcgaggaggaagacgacgactcctcggacaccggctccgtcgtcagcctgggacacacaacaccgtcgtccgattacaacaacgacgtcatttcgcctcccagtcagacgcccgagcagtcgacgccgtccagaatacgtaaagctaagttatcgtctccaatgacgacgacatccacgagccagaaaccggtgctgggcaagcgagtcgcgacgccgcacgcgtccgcccgagcgcagacggtgacgtcgacgccggttcagggaaggctagagaaacaggtgtcgggcacgccgtcgacggtacccgccacgctgttgcaacctcaaccggcttcgtctaaaacgacgtcatcaaggaacgtgacttctggcgcgggaacctcttccgcttcttcggctcgacagccgtcagcctcggcgtccgttttgtcgcccacggaggatgatgtcgtgtcccctgccacatcgccgctgtccatgctttcgtcagcctctccgtccccggccaagagtgcccccccgtctccggtgaaaggccggggcagccgcgtcggtgttccttccttgaaacctactttgggcggcaaggcggtggtaggtcgaccgccctcggtccccgtgagcggtagcgcgccgggtcgcctgtccggcagcagccgggccgcctcgaccacgccgacgtatcccgcggtaaccaccgtttacccaccgtcgtctacggccaaaagcagcgtatcgaatgcgccgcctgtggcctccccctccatcctgaaaccgggggcgagcgcggctttgcaatcacgccgctcgacggggatcgccgccgtaggttcccccgtcaagagcacgacgggcatgaaaacggtggctttcgacttatcgtcgccccagaagagcggtacggggccgcaaccgggttctgccggcatggggggcgccaaaacgccgtcggacgccgtgcagaacatcctccaaaagatcgagaagattaagaacacggaggaatag

SEQ ID NO: 14922 - DNA, 834 bp, unidentified
  misc_feature 1..834: note = Synthetic
  source 1..834: mol_type = other DNA
atcaaaactttgaaattgtcgatcctacatttaccattcattattacgtttagcatgattattcaaagtacacgtagactgagacgagcatctagcttgttaaagaaaagcaaaccttacaacaaagaaaaaactaacttatctttatctttgtcacttaaagaactccattcggttttcaaattatttccagagtatgaattgaaatttctaaatatgatgaaacttccaataaccggtaaagaacctatcaaaattccattcgatctaagtctacatcatcaacatacgtgcttagacttatcaccatatgccaatgaacaagtttcaaaaagtgcatgtgttaattgtggtacaacaaacattccaacagcttcagatgctatggtggcatatatgaatcaaatttcaaacgtaatgcaaaatagattatattactacggttttcagaaaaaggttgaactgattcgtatgtcagccaagcaaccaacgctttttcaaattttttatattctttcaagcatagcaagtaattttttaccaatcatgtttgaaaataacgagaaattaaatatgtatgttgttttccaaacaagaactcttcatatcccttgcgaatgtatcaatcagattatgacagtctcctccggatacactgtacttttagacatcttacacgacagcattgtactacatgttctttgtaaaactattgagactagcaatattcaaattgatattaatgttcttcagcgaaaaattgaggaaatggacgtacccgatgaaataggtgacaagttcgaaaagctgaaacacattctaccgtttatttaa

SEQ ID NO: 14923 - DNA, 1008 bp, unidentified
  misc_feature 1..1008: note = Synthetic
  source 1..1008: mol_type = other DNA
atggcgatatcgactttttcaattggcgatttgggttatcttagaaattttttgcagaatgaatgtaactggttcaggatttgtaaaaaaacattctatcgcgaatatcgcagcgttgcgacatcgtctcctatattttcgttgaagaataagcctaagaaatattgcatgcattgcgagatggtagtgctcaagcgaagtcatgaatttatgttcagccttgcggtaaacggcatacattttggacagtttttgaccggaataatgaaatttaagaagaaacaagttgcggaagggctctgttactatgtattggaattgggaagcataagtcctgtcgatttgagctttatcccaaaatataattctgactgcgttacaagcatgcattgtgttacaccggagcttatttatgaaaattgctctattgtgtgtcccgaagaggcaagtcgcctcactgtaaaagggctcggggacaataaattgattcccttaggtgggtgtggagtatggtgtctgaaaaatggtggcgatctgtatatctatgcttttgtactcgcttacgatctttacgtagcttgttatgacaaaaccatctttccatctctggcgaaaattgtttttgatatgatagcttgcgattccgaagattgcgtcttttgtaaagatcacaacaaacatgtatcgcaagccggacatattgtagggtgcgtctctaatcaagaaacctgtttttgctacacaccgtgtcaaaaaaaaatgactgatattaacaatccggagttaatctctttgctctgtgatcaggaaattaataagatagatattatgtatcccgagaaaaaagcatcgttatcacttgacattaattcttacgttcatgggtacctcggcgacgagccttgtgcgttaaaatgtgttaattggatgccaatcaggatcagctcagctctgagcaggctgattattttgtcgtgtcctgtgtgtaagcgtgtggtaatggactaa

SEQ ID NO: 14924 - DNA, 123 bp, unidentified
  misc_feature 1..123: note = Synthetic
  source 1..123: mol_type = other DNA
ttggcgatttgggttatcttagaaattttttgcagaatgaatgtaactggttcaggatttgtaaaaaaacattctatcgcgaatatcgcagcgttgcgacatcgtctcctatattttcgttga

SEQ ID NO: 14925 - DNA, 90 bp, unidentified; identical to SEQ ID NO: 7740
  misc_feature 1..90: note = Synthetic
  source 1..90: mol_type = other DNA

SEQ ID NO: 14926 - DNA, 33 bp, unidentified
  source 1..33: mol_type = other DNA
  misc_feature 1..33: note = Synthetic
ataaccatttggataaccaccagcgtttattaa

SEQ ID NO: 14927 - DNA, 1665 bp, unidentified
  source 1..1665: mol_type = other DNA
  misc_feature 1..1665: note = Synthetic
atgacacagttaagtctattttatcaatttccaatccaaccaattttcgaagggcatgtcagaaatactctaatttgtaccgaggaagatatgcaacaactccaaaacttgggaattcgaaaacttcgaaaagaaaaagaagaaattcaaaaaaacaagattttaaaaaacttgttaaaaactgaacttgatgttttgcaagcacatgtacagacagaatgccagaaattaaatacaaatttaagagacattgaaaatgcattgcttttagaaaatcaaaaaataattccttctagtgaaacacgttctgtcttggaagagtctctccaggctaaaactgtcacgcaagtcacaattacacaaattgatcctgctattcatttcacggaaaatttccgacctgagatgataaaaactttttataataatactcagatgtggagctatacgtttggagcttggttttacaaattaaagcgagctttctttaccgattctaaattaaaaagaatgctaaagttaacatatgttgattctctctctattacacaggaattgctgtctatttcaattaatgcattggaacaaattactatttatcctatgcatgataatttagtgtccgatttagaagctggtttgtgtctactgactgctttttttgcatcgtatcctggaactttcttaaccgaaaatattaaattcgtggatgtcattcaaaatttgtctcaaatttttagatatctaaacaccgaaattttagctacgaaaaacgcgtcaccacaggatttttattttggattcaatgatccagacaaaatgaaatattttattccgttgtgtaaagggaggcattatgcaataaatacattcagtaatcatatcttaattaaaatttttataaaaaaaggtgtgataaagcaagttcccggagatcaaatgtcgaaaggacatgttgtaatagaatcgaagttgacaggcacgttaacagatgataaattattatattggactcaaattttattgcaaccgaaattgggaaaagaggtgccgatatttgtccatcagcagcagtatttgcgttctggaattgttgccatagaatccttatatttactttggcaaattttaaactcagaaagcatttttggaaagagaactgggaaattttatctaacgacaattttcccccatgtaaatgcagaagatgttacagaaacagaattttcttctgtcaatatccagaattttgagtttctcatgaaaaactatgtcgtccccacatatttagccaataatgaaagtactatttccactttatttccggggttaatcagcattgtagttaacgaaagtgttcgtttaggctgggatcataatcaaaatactttgacacaaactaatgctttgcatagccaaacaaaagacaatccgtttgttgaatatatccgttcacaattagaagaaacggcagaacttgcggtactcgagaaacatgataaaattctttttcattttgaaaatggcttgaatgtgacactctctttagcacttccacgacataggttgttcgctatggcatcctcattatttaatgtggctgatttgtatgatttcttgtattttttggtattaggttttattccagtagcaactgttatttga

SEQ ID NO: 14928 - DNA, 21 bp, unidentified
  misc_feature 1..21: note = Synthetic
  source 1..21: mol_type = other DNA
atgactgtttccaaaccgtaa

SEQ ID NO: 14929 - DNA, 21 bp, unidentified
  source 1..21: mol_type = other DNA
  misc_feature 1..21: note = Synthetic
atgactgtttccaaaccgtaa

SEQ ID NO: 14930 - DNA, 975 bp, unidentified
  misc_feature 1..975: note = Synthetic
  source 1..975: mol_type = other DNA
atggcttctgacgtgggttctcatcctctgacggttacacgattccgctgcagagtgcattatgtgtacaataaactgttgattttaactttgtttgcccccgtgattctggaatccgtcatctacgtgtccgggccacagggagggaacgttaccctggtatccaacttcacttcaaacatcagcgcacggtggtttcgctgggacggcaacgatagccatctcatttgcttttacaaacgtggagagggtctttctacgccctatgtgggtttaagcctaagttgtgcggctaaccaaatcaccatcttcaacctcacgttgaacgactccggtcgttacggagcagaaggttttacgagaagcggcgaaaatgaaacgttcctgtggtataatttgaccgtgaaacctaaacctttggaaactactccagctagtaacgtaacaaccatcgtcacgacgacatcgacggtgaccgatgcgaaaagtaacgttacagggaacgtcagtttagcaccacaactacgtgccgtcgctggattctcccatcagacgcctttggaaaacaacacgcacctggccttgggagaaggttttgttcccacaatgactagctcgagactatctgcgtcggaaaattatgacggaaattatgaattcacggaaactgccaatacaacgcgtacaaataccagtgactggataacgttaggaagcagtgcatcgctgttgaaaagcacggagactgcagtcaacctcagcaacgcgactacggtcatcccacaacctgtagaatacccggctgggggagtacaatatcaaagagcggcaacgcattattcttggatgctaatcattgtcatcattctcatcatttttattatcatctgtctacgagcacctcgaaaaatctaccatcactggaaagacagtaaacagtacggacaagtgtttatgacagacacggaactgtga

SEQ ID NO: 14931 - DNA, 669 bp, unidentified
  misc_feature 1..669: note = Synthetic
  source 1..669: mol_type = other DNA
atggcttctgacgtgggttctcatcctctgacggttacacgattccgctgcagagtgcattatgtgtacaataaactgttgattttaactttgtttgcccccgtgattctggaatccgtcatctacgtgtccgggccacagggagggaacgttaccctggtatccaacttcacttcaaacatcagcgcacggtggtttcgctgggacggcaacgatagccatctcatttgcttttacaaacgtggagagggtctttctacgccctatgtgggtttaagcctaagttgtgcggctaaccaaatcaccatcttcaacctcacgttgaacgactccggtcgttacggagcagaaggttttacgagaagcggcgaaaatgaaacgttcctgtggtataatttgaccgtgaaacctaaacctttggaaactactccagctagtaacgtaacaaccatcgtcacgacgacatcgacggtgaccgatgcgaaaagtaacgttacagggaacgtcagtttagcaccacaactacgtgccgtcgctggattctcccatcagacgcctttggaaaacaacacgcacctggccttggtaggtgttgttgtgtttttagttctgatagttgtttgtattatggggtggtggaagttgttgtgtagtaaatcagagttatag

SEQ ID NO: 14932 - DNA, 75 bp, unidentified
  misc_feature 1..75: note = Synthetic
  source 1..75: mol_type = other DNA
ctgcttacggtttcgtccgtgttgcagtcgatcatcagcatacctaggtttcgtccgggtgtgaccgaaaggtaa

SEQ ID NO: 14933 - DNA, 75 bp, unidentified; identical to SEQ ID NO: 14932
  source 1..75: mol_type = other DNA
  misc_feature 1..75: note = Synthetic

SEQ ID NO: 14934 - DNA, 33 bp, unidentified; identical to SEQ ID NO: 1
  source 1..33: mol_type = other DNA
  misc_feature 1..33: note = Synthetic

SEQ ID NO: 14935 - DNA, 15 bp, unidentified
  misc_feature 1..15: note = Synthetic
  source 1..15: mol_type = other DNA
aggatgatacattaa

SEQ ID NO: 14936 - DNA, 120 bp, unidentified
  source 1..120: mol_type = other DNA
  misc_feature 1..120: note = Synthetic
atgaggctagcaataatgttgatcacgactatgtatatccacttccagaaaatatggtatatagatttgacaagtccactaacatactcgattatctatcaacggaacgggaccatgtaa

SEQ ID NO: 14937 - DNA, 579 bp, unidentified
  misc_feature 1..579: note = Synthetic
  source 1..579: mol_type = other DNA
atcattcatccgaccacccgttctatccctaaatggcagaggaacaggcctaccatgtcagcaaagggctggaatgcctcaaagccctcagagagaatcctcctgacattgaggagattcaagaggtcagcagcctcagagaccaaacctgcaacccaggccaagagaatggaaccacaggcatgcaggaagaggaggactctcagaatctcgatgaatcacacgagccaacaaaaggatcaaactatgtcggccatgtacctcaaaataatccgggatgtggagaacgcaatactgcgcttgtggaggcggagcggccccctagagaggacatccaaccaggacctggaatacgatgtgatcatgtttatgatcacagcggtgaagaggttaagggaatcgaagatgctgacagtctcgtggtacctgcaggcactgtcggtaatcgaggattcgagagaggagaaggaagccttgatgatagcactgaggattctggcgaagattattccgaaggaaatgcttcatctaactggggatattctttcggccttaaaccggacagagcagctgatgtga

SEQ ID NO: 14938 - DNA, 1530 bp, unidentified
  source 1..1530: mol_type = other DNA
  misc_feature 1..1530: note = Synthetic
atggcagaagaacaagcataccatgtcaacaaggggctggaatgtatcaagtccctcaaagcctctcccccggatctatccaccatcagagacaccattgagagctggagagaggggctcagcccctcgggccgtgcaacaccgaaccctgatacgtccgagggagatcatcagagtatcaaccaatcatgctcaccagcaatcggaccaaacaaagtctacttgtctcctggagataatctcggatttagagagatcactggcaacgactgtgaggctgggctcggaggagtccaggggaaaagatccaactctcaagtacagcgttactatgtttatagccacgggggtgaagagattgaaggactcgaggatgctgactctctcgtggttcaagcagatcctccagttgctaacgtcttcaatggaggagaggatggatctgacgacagcgatgtggactctggcccagatgatcccagcagagatactctatatgaccggggatctgttgccggcaatgatgtcgctaggtccacagatgtcgaaaaactagaaggtgctgatattcaagaggttcttaactcccagaaaggcaaaggaggaagattccaaggcgggaagaccttacgagtcccggaaatacccgatgtcaagcactccagaccatcagcccaatcaattaaaaagggcacagacgggaactcagtctcatctggaacggtgacagagtgtttatcgataagtggtgcaacccaagctgtgccagagtcaagatgggagtcatcagagcaaaatgcgtctgtggggagtgtcctcaagtctgcgaggagtgcagagacgatccaggggttgacacaagaatctggtaccatagcatcactgactcagcctaaagagaatgactccgagtatgagtatgaggatgacctatttaaagagattcaggacatccgtgcaagcattgccaagatccatgatgacaacaaaactatcctctcaaagcttgattctatactgttattgaaaggagaagtcgacactatcaagaaacaaatcagcaagcagaatataagtatatccaccattgagggccatctctccagtataatgatagctatcccgggctttgggaaggatatcaaggacccaacatccgaggttgagttgaacccagatttaagacccataataagccgtgactctggcagagccctcgcggaggtcctcaagaaacccgctgtggataggtctcagaaaattggaaccaaagccaactccagctcaaagggtcagcttcttaaggatctccagctaaaacctgtcgacaagcaggcaagctctgcaatcgggtttgtcccatccgaccatgaatcatccagaaatgtcatccgctccataatcaagtcgagcaagctaaacactgatcacaaggactatcttctagatttactaaatgatgtgaaaggctccaaggatcttaaggaattccacaagatgctaacagcaattctcgccaagcacccgtaa

SEQ ID NO: 14939 - DNA, 1095 bp, unidentified
  misc_feature 1..1095: note = Synthetic
  source 1..1095: mol_type = other DNA
atggcagaagaacaagcataccatgtcaacaaggggctggaatgtatcaagtccctcaaagcctctcccccggatctatccaccatcagagacaccattgagagctggagagaggggctcagcccctcgggccgtgcaacaccgaaccctgatacgtccgagggagatcatcagagtatcaaccaatcatgctcaccagcaatcggaccaaacaaagtctacttgtctcctggagataatctcggatttagagagatcactggcaacgactgtgaggctgggctcggaggagtccaggggaaaagatccaactctcaagtacagcgttactatgtttatagccacgggggtgaagagattgaaggactcgaggatgctgactctctcgtggttcaagcagatcctccagttgctaacgtcttcaatggaggagaggatggatctgacgacagcgatgtggactctggcccagatgatcccagcagagatactctatatgaccggggatctgttgccggcaatgatgtcgctaggtccacagatgtcgaaaaactagaaggtgctgatattcaagaggttcttaactcccagaaaggcaaaggaggaagattccaaggcgggaagaccttacgagtcccggaaatacccgatgtcaagcactccagaccatcagcccaatcaattaaaaagggcacagacgggaactcagtctcatctggaacggtgacagagtgtttatcgataagtggtgcaacccaagctgtgccagagtcaagatgggagtcatcagagcaaaatgcgtctgtggggagtgtcctcaagtctgcgaggagtgcagagacgatccaggggttgacacaagaatctggtaccatagcatcactgactcagcctaaagagaatgactccgagtatgagtatgaggatgacctatttaaagagattcaggacatccgtgcaagcattgccaagatccatgatgacaacaaaactatcctctcaaagcttgattctatactgttattgaaaggagaagtcgacactatcaagaaacaaatcagcaagcagaatataagtatatccaccattgagggc

SEQ ID NO: 14940 - DNA, 543 bp, unidentified
  misc_feature 1..543: note = Synthetic
  source 1..543: mol_type = other DNA
aagcttaccatgtcaacaaaggcctggaatgcatcaaggctctcagggcccgacccctcgaccccctggtcgttgaagaagcccttgcagcatgggtcgagacctccgaagggcaaacgcttgaccgtatgtcctccgacgaggccgaagcagaccatcaggatatcagcaagccatgcttcccagcagctggaccaggcaaaagcagcatgtctcgctgtcacgatcagggacttggaggaagcaacagctgtgatgaggagctgggagcattcattggtgactcctcaatgcatagcaccgaggtacagcattatcatgtttatgatcacagcggtgaaaaggttgagggagtcgaagatgctgactctatcctggttcaatcaggcgctgatgatggtgtcgaagtctggggaggagatgaggaatctgagaacagcgatgtggattctggcgaacctgatcccgagggaagtgctcccgctgactggggatcttctcccatctctccagcaacaagagcctccgatgttgaaacagtag

SEQ ID NO: 14941 - DNA, 921 bp, unidentified; identical to SEQ ID NO: 12986
  source 1..921: mol_type = other DNA
  misc_feature 1..921: note = Synthetic

SEQ ID NO: 14942 - DNA, 108 bp, unidentified; identical to SEQ ID NO: 7769
  misc_feature 1..108: note = Synthetic
  source 1..108: mol_type = other DNA

SEQ ID NO: 14943 - DNA, 51 bp, unidentified; identical to SEQ ID NO: 7770
  source 1..51: mol_type = other DNA
  misc_feature 1..51: note = Synthetic

SEQ ID NO: 14944 - DNA, 3384 bp, unidentified
  source 1..3384: mol_type = other DNA
  misc_feature 1..3384: note = Synthetic
atgaagctactactaatcacaatactagtcacaattactgaacaaaagtcaaatttcgatctaactcttcagtgcccacataatccaagacaggatgaaggtttttcttatgggtggattgacatgcctgttcaggcttatacgactttgcagcagattacagtggaaagtagctgtccgtttgaattccaccagctccgaaagaccctttattcaactactgtcgtatcatggaagaagaaaactgacactggtacaactactcaggcaggtgatactacttatgaggggacagaggagaacggttcattacttggcatatgtgccttagaccagggtgtctcttcaaagctaatcactgggaggcagggtttagtatgtcaagaactgagctgcaatacaactgcatgtttaacaacattgcatgttattataccacaacaaatatgttcaaatgtaaggtcatgtgtcatgacatggaaagaccatagaataaatctaaattttgaaagaacattctgtcctaatggtttaatagtcagtggaaattgctttcagccactctacggtagttctcaactgcctacaaatgtagagacaacagagcttcaagtttcttgtttctttgttcgcgagaggactggaggccataaagtactggttgagttagagaagattggtggtgctaaaagctgtacagatcattccttttattcctcatattcatgctttctgcaaggttactctgtacggatcaaagtcccaaatcttgccgatgctattagtgcagaaataatctcgaaaatgattatgttcaattatggagaagatcatgacaagcctgggcacggtattggttcttttagaattagttctgaaaaagaattcaaagtagcaaacacagagtctgataagtttaagggattgtgtttatcaggtcagattctctatacatcaacatatgtttatcctaaacctattaatcactatacaaagtatgttctgtcaaagggtgttctgccttacgtcaactatacatcatgtgataaaaaagttataccattagtgtggagaggtcttgtgacagtccctggtttttctgaaactatgcagccatgtaatgttttctgtacactagcaggacctggagcacagtgtgaagcattttctcagactggaattttcaatataagttctccaacatgtcttattggtaggatgcataaataccatctaatggaagatcagataaattttgtttgtcaacggcttgataaagacattgtagtttattgtaatggtgaaaagaaagtcattaaaactgcaacattggttataggtcagtgtatttacagcttgacaactttattttctatgtttccatggattgcacattcaatggctgtagaagtttgtgttccaggaattcacggttgggcaacaattgtattaatgataactttttgttttggttggcttattattccatccttaacatggttaattttacaagttttaaaagtgcttatttatgttttcaataaaaaggctggaaagttatatttcaatcatatatttgagaaggttaaaaaggaatttcagcatacaattggaaatacatcttgtagtctttgccagactgactgcgagactaatgaagagctgaaggcacataacgaattatgtccacaggggcagtgtccatactgcttgaaggacctagctccaagtccagctatacttactgagcattttaagttttgccctttaaaagatagataccaacgaaaagttgaaaatataattgctcctttacatccatcgtcaattataatcagaaaggtgtcaaattttaggtataagaatagatgctatataagtatggtgtggacactcttgctcattattgaactttgcatttgggcagcaagtgccaatgtggtagatgttgacacagaatggaatgatgttgcccatggtgttggacatgtgcctatggcatcggattatgaattggatttttctcttccttctggtgcaggctatacacatagaagatatttagaccacccagttaataaagataaaagtataatgttcactgtaaatattaaacaacaacttgtaaaagcaacagtccaatcattaggtcattggatggatggagagctaaacattaaatctgtttttcattgctatggagaatgtaaaaaatattcatacccgtggcagtttgcacattgtaagtttgaaaaggattatcagtatcaaacaggttgggcatgtaatccaagtgattgtccaggagttggaactggttgtacagcctgcggtctttatctagataaaattgttccaaaagcaagtgtgtacagaatcctaagcttgacatactcaagaagaatatgttaccagctaggaaatgaacagtcttgtaaggatattgaccaaaatgattgcttgaccagtgatcatgtgaaaatatgtatgattgggacagtttcaaacctaaatataggagatacacttgtgttcttagggccattagcaggtggtgctataatcatgaagcagtggtgtacaagtaattgtcgttacggtgatcctggtgacattatgatgaacagtgctactttacagtgtcctgactttgatggtgtgatagaaaggcaatgtagatttgcaacagagcctgtttgtgtttataatggtaacctcatttctgggtacaaaaaaatgatggcaactagggattcatttatttcgattaacatgagtgatgtcactctaggtccatcaggactgttgtggtatgatagtgatagtatttataaagaccatatgaatattcaagtgagtagggaccttgcctttgaagatttgagtgaaaacccgtgtcaacttgagattagtgttttaggcataactggttcatggggttctggagttggttttacccttgactgttcagtgtcacttactgagtgctctacctttatgacagctataaaggtttgtgacaaagctatgtgttatggtggtaaatctgttcatcttaataggggtcagaattctgttaaggtgcaaggcagaggtggacacagtgggtccaaattcatgtgttgtcatgataaagtgtgttcaaaagatggcttaaaggcaagtgctcctcaccttgacagagtttctggtgttaatgtgttaaattcagatgcattttcagatggttcggattcgtgtggtttcatttgctggatgacaaaagtaggggaatggatgagtggcatgtttcatagcagctggtggatatttttgattttattcattgtattcattttttctttattgcttcttggtcttctatgccctgctaggaagcattaa

SEQ ID NO: 14945 - DNA, 81 bp, unidentified
  misc_feature 1..81: note = Synthetic
  source 1..81: mol_type = other DNA
atgattggtcagataataaggatagtgaagaaccaatttcaaaagttcttgttgttgcaggggtccctggtaatgttataa

SEQ ID NO: 14946 - DNA, 1290 bp, unidentified
  misc_feature 1..1290: note = Synthetic
  source 1..1290: mol_type = other DNA
atggcaactatggaggaattacagagggaaatcaatgcccatgagggtcaattagtgatagccaggcagaaggtgagggatgcagaaaaacagtatgaaaaggatccagatgagttgaacaagagaacattaactgaccgagagggcgttgcagtatctatccaggcaaaaattgatgagttaaaaaggcaactggcagataggattgcaactgggaaaaaccttgggaaggaacaagatccaacaggggtggagcctggagaccatctgaaagagaggtcaatgctcagttatggtaatgtgctggatttaaaccatttggatattgatgaacctacaggacagacagcagactggctgagcatcatcgtctatcttacatcctttgtcgtcccgatacttctgaaagctctgtatatgttgacaacaagggggaggcaaactaccaaggataataaagggacccggattcgatttaaggatgatagctcgttcgaggatgttaacggtatccggaaaccaaaacatctttacgtgtccttgccaaatgcacagtcaagcatgaaggcagaagagattacacctggtagatatagaacagcagtctgtgggctctaccctgcacagattaaggcacggcagatgatcagtccagttatgagtgtaattggttttctagcattagcaaaggactggagtgatcgtatcgaacaatggttaattgaaccttgcaagcttcttccagatacagcagcagttagcctccttggtggtcctgcaacaaacagggactacttacggcagcggcaagtggcattaggcaatatggagacaaaggagtcaaaggctatacgccagcatgcagaagcagctggctgtagcatgattgaagatattgagtcaccatcatcaatatgggtttttgctggagcaccagaccgttgtccaccaacatgtttgtttatagcaggtattgctgagcttggggcatttttttccatcctgcaggacatgcgaaatacaatcatggcatctaagacagttggaacatctgaggagaagctacggaagaaatcatcattttatcagtcctacctcagaaggacacaatcaatggggatacaactaggccagagaattattgtgctcttcatggttgcctggggaaaggaggctgtggacaacttccacttaggggatgatatggatcctgagctaaggacactggcacagagcttgattgatgtcaaagtgaaggaaatctccaaccaagagcctttgaaactctaa

SEQ ID NO: 14947 - DNA, 1290 bp, unidentified
  misc_feature 1..1290: note = Synthetic
  source 1..1290: mol_type = other DNA
atggcaactatggaggaactacagagagagatcaatgcccatgagggtcaactggtgatagccaggcagaaggtaagagatgcagaaaaacagtatgaaaaggatccagatgagttaaataagagaacattaacagacagagaaggggttgcagcatccatccaggccaagattgatgagttaaaaaggcagctagcagataggattgcaaccggaaagaaccttggaaaggaacaggatccaacaggggttgaacctggagaccatctgaaggaaagatcaaagcttagctatgggaatgtactggatttgaaccatctggatattgatgagcccacaggacagactgcagactggttaagtattgttatctatttgacatcctttgttgtaccgatccttctgaaagccctgtatatgctaacaacgagggggagacaaacaaccaaagacaacaaagggaccagaattcggttcaaggatgacagttcttttgaggatgtcaatgggatccggaaaccaaaacatctgtatgtatccttggccaatgctcaatcaagcatgaaggcagaagagattacacctggtaggtacaggacagcaatctgtggactctatcctgcacagatcaaggccagacagatgattagcccagtcatgagtgtaattggtttcctggcactggctaaagactggagtgaccgaattgagcaatggcttagtgaaccttgtaaactacttccagatacagcagcagtaagcctccatggaggccctgcaacaaacagggactatctacggcaaagacaggtggcactgggtaatatggaaacaaaagagtcaaaggccatacgccaacatgctgagactgcaggctgtagcatgatcgaagatattaagtcaccatcatcgatatgggtctttgctggagcacctgatcgctgtccaccaacatgcctgtttattgcagggattgctgaacttggagcatttttttctatcctccaggatatgcggaacacaattatggcttcaaagacagtgggaacatctgaagagaaattgcggaaaaaatcatcattctatcaatcctatctcaggcgaacacaatcaatgggaatacaactggaccagaggattattgtgctctttatggttgcctgggggaaagaggcagtggacaatttccacctagggggtgatatggatcctgagttgcgaacactggcacagagtttgattgatgttaaagtgaaggagatatccaaccaagagcctttaaaactgtaa

SEQ ID NO: 14948 - DNA, 1290 bp, unidentified
  source 1..1290: mol_type = other DNA
  misc_feature 1..1290: note = Synthetic
atggcaactatggaggaaatccagagagaaatcagtgctcacgaggggcagcttgtgatagcacgccagaaggtcaaggatgcagaaaagcagtatgagaaggatcctgatgacttaaacaagagggcactgcatgatcgggagagtgtcgcagcttcaatacaatcaaaaattgatgaactgaagcgccaacttgccgacaggattgcagcagggaagaacatcgggcaagaccgggatcctacaggggtagagccgggtgatcatctcaaggaaagatcagcactaagctacgggaatacactggacctgaatagtcttgacattgatgaacctacaggacaaacagctgattggctgactataattgtctatctaacatcattcgtggtcccgatcatcttgaaggcactgtacatgttaacaacaagaggtaggcagacttcaaaggacaacaaggggatgaggatcagattcaaggatgacagctcatatgaggatgtcaatgggatcagaaagcctaaacatctgtatgtgtcaatgccaaacgcccaatccagtatgaaggctgaagagataacaccaggaagattccgcactgcagtatgtgggctatatcctgcacagataaaggcaaggaatatggtaagccctgtcatgagtgtagttgggtttttggcactagcaaaagactggacatctagaattgaagaatggcttggcgcaccctgcaagttcatggcagagtctcctattgctgggagtttatctgggaatcctgtgaatcgtgactatatcagacaaagacaaggtgcacttgcagggatggagccaaaggaatttcaagccctcaggcaacattcaaaggatgctggatgtacactagttgaacatattgagtcaccatcgtcaatatgggtgtttgctggggcccctgataggtgtccaccaacatgcttgtttgttggagggatggctgagttaggtgccttcttttctatacttcaggatatgaggaacacaatcatggcttcaaaaactgtgggcacagctgatgaaaagcttcgaaagaaatcatcattctatcaatcatacctcagacgcacacaatcaatgggaatacaactggaccagaggataattgttatgtttatggttgcctggggaaaggaggcagtggacaacttccatctcggtgatgacatggatccagagcttcgtagcctggctcagatcttgattgaccagaaagtgaaggaaatctcgaaccaggagcctatgaaattataa

SEQ ID NO: 14949 - DNA, 1293 bp, unidentified
  source 1..1293: mol_type = other DNA
  misc_feature 1..1293: note = Synthetic
atgggcacggtggaggagttgcagaaagagttgaccacgcaggagggacagttggtagtggcatcacagaaagtcagagatgccgaagcacaatacaataaggatcctgatgagataaacttgaaggttcttacagaccgccagaatactcagaccggagtacaagcaaaaattgatgagttaaaaagggcaatacaagataagatgtcagcaccttctttattgttccaaaagagagaccctacagggatggaaaatgatgatcatttaatggaacgatcaactttacgttatgggaatgtgattgatgtgaactcattggacattgaagaacccacaggacaaactgctgattggttggccattgttacttacattacaggttttgttgtaacaattcttctgaaaggtttatacatgctgactacaaggggaagacagacagttaaagataacaagggcacccggatccggtttaaggatgacagttcttatgttgaaattaacaacattaggcaacccaaacacctgtatgtgtctatgcctagtgcccagtctagtatgaaagctgatgagattactccggggagattcaggacagttgtatgtgggttgtatcctgctcacataaaagctaaacagatgattagtcctgtgatgggtgtgatagggtttcctgcacttgttagaaactgggatgagaggattgtagagttttataaggaggagtgtccttttaaatttgaaatcaaaggatatgcaggacctgctcctgcaaagccaacaatgaaagattttctaatgacaaggcaagtggatcttaataacatggtgaatgaagaatacagtaaaattagagatatggcgcgtcaggctggctgcagtttgtttgaatcaattagtagcccttctgcagcctgggtttttgcgggggctcctgataggtgccccccgagttgcctttatattgcagggatggcagagcttggtgctttcttttctgttttgcaggacatgaggaatgcagttttagcttctaaacttgcaggaactgctgaggaaaagttacaaaaaaagtcttccttttatcagtcatatctaagacgaactcaatcaatgggggtacaagttgatcagagattagctataacattcatggcatgttggggaaaagaagctgtggatcatttccaccttggggatgatatggaccctggtctgcgtgcacttgcacaggccttgattgatcaaaaagttaaagaaatatctaatcaggagccaattaagttatag

SEQ ID NO: 14950 - DNA, 39 bp, unidentified; identical to SEQ ID NO: 7782
  source 1..39: mol_type = other DNA
  misc_feature 1..39: note = Synthetic

SEQ ID NO: 14951 - DNA, 12 bp, unidentified
  source 1..12: mol_type = other DNA
  misc_feature 1..12: note = Synthetic
atggacgtatga

SEQ ID NO: 14952 - DNA, 111 bp, unidentified; identical to SEQ ID NO: 7787
  misc_feature 1..111: note = Synthetic
  source 1..111: mol_type = other DNA

SEQ ID NO: 14953 - DNA, 639 bp, unidentified; identical to SEQ ID NO: 12367
  misc_feature 1..639: note = Synthetic
  source 1..639: mol_type = other DNA

SEQ ID NO: 14954 - DNA, 1287 bp, unidentified
  misc_feature 1..1287: note = Synthetic
  source 1..1287: mol_type = other DNA
atggcagatatagagaggttaatagcagagggccttgagatagagaaagagctgatgaccgctcggattcgtttgcaagaggcaaaggaagctgcagagagaaatcctgatgagttaaatttaaagggagttgatgccagacaaggggtcgtaacagctttagaacagaagtctgctgaaaaccagagacttattgctgaacaacgacatgcattgccaccaacaaaaccactaaagaagccaacagaccttgatgatgatgagcatcttactgaaaggtctacactccgttatggtagtgtaattgatctgaatgaccttgacattgatgaaccaagtggtgcatctgctaactgggttgcgatttgcacatacattttaggttttggtgccacaatcttgttgaaagcactttacatgctcacaacacgtggtagacagaccattaaagagcataagggtaatcgggtccggtttcgtgatgactcatcttatactgagaaaggcggtgttaaggtcccaaaacatctttatgtctcactcccaactgctcaatcagctatcaaggcagaagagcttactccaggaagattcagaactattgtctgtggtttgtatccatcggaagcaaaagtacgtggcctgataagtcctgttatgggagtgataggctttcagcacatggcacaaaattggagtgaaatgattcataaattcatgcatatgaggtgtccatttttggataatcctggcttacaagttgactctgccctccttactaaccaggcttactttgagatgagaagtgatgcacttgaaaagattgaagctatagagataagatcgattagagaggaggcaattgacaatgataggaagcttattaatgacattcttcagcctgatgcaccatggttgtttgctggggcaccagataggtgccctcctacctcattgtatgttgcgggtatacctgaattaggtgcttttcttgcattgatgcaggatgtgagaaatgctattatggcctcaaagatgactggaactgttgaagagaaagtaaaaaggaaatcatccttttaccagtcatacatgagaaggactcagtcaatgggaatgcagatggatcagcgaattatccatttgtttgttatggcatggggaaagttgatgattgaccatttcaatctaggtgatgacatggatcctgcattgagacaaatgtgccaggcactccttgatgagaaggtcaaggagatctgcaacaatgaacctatgagactgtga

SEQ ID NO: 14955 - DNA, 1287 bp, unidentified
  source 1..1287: mol_type = other DNA
  misc_feature 1..1287: note = Synthetic
atggcaacaattgaggaattacaaaaggacttggcacttcaagaaggccaattgacaataactaaacaaaaactcaaagatgcccaagaacaatatgaaaaggatccagatgatataaacaaggcaagcgttctacagagacaaatggatgcaaagatgacagaagatagggtcaaccagttaaaacaaatgatagctgatagactcaaagcaggtgcccagtctgcagcagcacaagagccaacaggaatggagtctgatgatcacctatcccaaaaatcaatgctcagatacgggaacactatggacttgaatatgattgaccttgaggaacctagtggacagactgcaaattggcttgccttgatcacttatgtcattggctttgtagatacaatcttgctaaaaggtctctatatgtttacaactaggggccgtgaaacaataaaggataataaaggtacacggattaaattgaaagatgattcatcctatgtggaagttggttctatcagaaagccgaaacatctttatatctcattacctagtacccagtcatccataaaagctgatgaactaacaccaggcagatttcggactttagtatgtggactttatccagctaaagtaaaacagagatgtatgattagtcctgtcatgggagttatagggtttaattacctagctaaagattgggatgagagaatagaagactttatgacacagcgttgcccttttattcaggtagtaacccaagcagccatggctcctcaaaatgcaaatttagattttatgaaggaaaggcaagataatcttaacaaaatgagaactcctgagtcacaggctattgaacaaatgatccaagggacacaatgtactgtcattgatagtatagagtccccttctgcagtttgggtctttgcaggtgctccagatcgttgcccaccaaattgtctttttattgcagggatggctgagttgggtgccttcttctcaatcctacaagacatgcgtaatacaatcatagcctcaaaaactgttgggacagcagaggaaaagctaaagaaaaaatcatccttttatcaatcatacttgaggagaacacaatcaatgggtattcagcttgatcaaaggattattattttatttatgtatgagtggggcaaagagatggtggaccacttccatctgggtgatgatatggatcctgagcttagaaacacagctcaggttcttattgaccagaaagttaaagaaatttccaatcaagaaccactaaaaatctaa

SEQ ID NO: 14956 - DNA, 42 bp, unidentified; identical to SEQ ID NO: 7791
  misc_feature 1..42: note = Synthetic
  source 1..42: mol_type = other DNA

SEQ ID NO: 14957 - DNA, 1311 bp, unidentified; identical to SEQ ID NO: 10860
  source 1..1311: mol_type = other DNA
  misc_feature 1..1311: note = Synthetic

SEQ ID NO: 14958 - DNA, 3405 bp, unidentified
  misc_feature 1..3405: note = Synthetic
  source 1..3405: mol_type = other DNA
atcatgtggagtttgctattactggccgctttagttggccaaggctttgcattaaaaaatgtgtttgacatgagaattcagtgcccccactcagtcaaatttggggaaacaagtgtgtcaggctacacagaactgcccccactctcattacaggaggcagaacagctggtgccagagagctcatgcaacatggacaaccaccaatcactctcaacaataaataaattaaccaaggtcatatggcggaaaaaggcaaatcaggaatcagcaaaccagaattcatttgaacttatggagagtgaagtcagctttaaagggttgtgtatgttaaagcatagaatggttgaagaatcctacagaaataggagatcagtaatctgttatgatctagcctgtaatagtacattctgtaagccaactgtctacatgattgttcctatacatgcatgcaacatgatgaaaagctgtttgattggtcttggtccttacagagtccaggtcgtttatgaaaggacatactgcactacgggtatattgacagaaggaaaatgctttgttcctgacaaggctgtcgtcagtgcattgaagagaggcatgtacgccatagcaagcatagagacaatctgcttttttattcatcagaaagggaatacatataagatagtgactgccatcacatcggcaatgggctccaaatgtaataatacagatactaaagttcaagggtattatatctgtattattggtgggaactctgcccccgtatatgcccctgctggtgaagactttagggcaatggaggttttttccgggattattacatcaccgcatggagaagaccatgatctccctggcgaagaaattgcaacataccagatttcagggcagatagaggcaaaaatccctcatacagtgagctccaagaacttaaaattgactgcttttgcaggtattccatcatactcatcaaccagtatattgactgcttcagaagatggtcgtttcatatttagtcctggtctatttcctaacctaaatcagtcagtctgtgacaacaatgcactccctttaatctggaggggcctaattgatttaacaggatactatgaggcagtccacccttgcaatgtattctgtgtcttatcaggaccaggtgcttcatgtgaagccttttcagaaggaggtattttcaatattacttccccaatgtgtcttgtgtccaagcaaaataggtttagagcagctgagcagcagatcagctttgtttgccaaagggttgatatggatattatagtgtactgtaatggtcagaaaaagacaatcctaacaaaaacattagttataggccaatgcatttatactattacaagtctcttttcactgttaccaggggttgcccattctattgctattgagttgtgtgttccaggatttcatggctgggccacagctgcacttttgatcacattctgctttggctgggtattgattcctgcatgtacattagctattcttttagttcttaagttttttgcaaatatcctccacacaagcaatcaagagaaccgattcaaagccattctacggaaaataaaggaggagtttgaaaaaacaaagggttccatggtttgtgagatctgtaagtacgagtgtgaaacattaaaggaattgaaggcacataatctatcatgtgttcaaggggaatgcccatattgctttacccactgtgaaccgacagaaactgcaattcaggcacattacaaagtttgtcaagccacccaccgattcagagaagatttaaaaaagactgtgactcctcaaaatattgggcctggttgttaccgaacattaaatctttttaggtataaaagtaggtgttatattctgacaatgtggactcttcttctcattattgaatccattctctgggcagcaagtgcagcagaaatcccccttgtccctctctggacagataatgctcatggtgttgggagtgttcctatgcatacagaccttgaattagacttttctttgccatctagttctaggtacacatataaaagacatctcacaaacccagttaatgaccaacagagtgtctcattgcacatagaaattgaaagtcaaggcattggtgctgatgtccatcatcttggacattggtatgatgcaagattgaatttaaaaacctcatttcattgttatggtgcctgcacaaaatatcaatatccatggcacactgcaaaatgccattttgagaaagattatgagtatgaaaatagctgggcatgcaaccccccagattgcccaggggttggtacaggttgtactgcttgtgggttatatctcgatcaattgaagccggtaggaacagcctttaaaattataagtgtaagatacagtagaaaagtgtgcgtgcagtttggtgaagagtacctttgtaaaacaattgatatgaacgattgctttgtgactaggcatgccaaaatatgtataattgggactgtatctaagttttctcaaggtgacactctactatttctggggcccatggaaggaggtggtataatctttaaacactggtgcacgtctacctgtcactttggagaccctggtgatgtcatgggtccaaaggataaaccatttatttgccctgaattcccagggcaattcaggaaaaaatgtaactttgccacaactccagtttgtgaatatgatgggaatattatctcaggctataagaaagttcttgcaacaattgattctttccaatcatttaacacaagcaatatacacttcactgatgagagaattgaatggagagaccctgatggtatgcttcgggatcatattaatatcgttatttctaaagatattgattttgaaaatttggctgagaatccttgtaaagtagggctccaggcagcaaacatagaaggtgcctggggttcaggtgtcgggtttacactcacatgccaggtgtctctcacagaatgcccaacatttctcacgtcaataagggcctgtgacatggcaatttgttatggtgcagaaagtgtgacactctcacgaggacaaaatactgtcaaaattaccgggaaaggtggccatagtggttcctcatttaagtgctgtcatgggaaagaatgttcattaactggcctccaagccagtgcaccacatttagataaggtaaatggaatctctgagttagaaaatgagaaagtttatgatgatggtgcacctgaatgtggcattacttgttggtttaaaaaatcaggtgaatgggttatgggtataatcaatgggaactgggttgtcctaattgtcttgtgtgtcctgctgctcttttctcttatcctgttgagcatcctgtgtcctgttagaaagcataaaaaatcataa

SEQ ID NO: 14959 - DNA, 3366 bp, unidentified
  misc_feature 1..3366: note = Synthetic
  source 1..3366: mol_type = other DNA
atgatttctatagctaagttagctgtgtgtgtgagtctactactatgtataagtgcaactgagcacaagcccattttgctcaattgtccacattatggtgttattggggctgagtatgtctgggggactacaagaattggacacttcccactagatgaggttaaaaacatggtatttgagacaacatgctcttttggtctacctgcacatgaccctatgacacaaatgaaggtgataacttggaaagagaaggaaactcatggtacttcaggggagtattttgataaagttgcaagtcacacagaaacagagggtgactttaaaagtttatgcacaaaaactcattatttgacatatcccttcaaaaatggaaattcatactgtttgaatgtccattgtaatcaaacactatgtgatgttgaagtcatagttattataagagctgtccactgcctaacacaagacatgtgtgtactttacagaagcaatattaaaataccaattatatttaagaagactcactgtatcaaatcgatgctgaatgaaggaaaatgttttcaaccagatttcacaataccctatagcccaaaaatacacactaggatgaacttgcctgtcctatgtatgcttatgccaacagatggccagccagaggggacaaaggagattgttggacagacatcatgcacagatataaagctggcaagttggtactcatgcctggtaggcgattattcaatgatctttgtacatagcgatataaagatgaggcaaataaaacttaacctaaaatttaggactaaccctcaaggcgatgatcatagtgatcgtagatcatctagaattcatattattgggcataagaacataaccacaataagcaataaacaaaacacactaacagccttcagaggtgcaacagattatacatcattattgtataatgtgcaatctacagacaaaaaacctacactgtttctaggctacacaccaactatgagctggacaacatgtggcacaagttatgtccctgcagtttggagaggccatgtggacacctggggaagtgttatagaaacagatgactgtaccatattttgtactcttgcaggtccgggtgcaagctgtgaggcattttctagttcagggatcttttcactaaattcaacaacatgtcttattccacatactcataggtttaaaggtttaggagaccaggttacttttatgtgtcagcgggtagactttgatttagagttttactgtaatggtaggcataaagtcataagaacaaagactcttgtgataggtcaatgtatacacacattcactagcttcttttcactgttcccaagtattgcacactcactagctgttgaaatatgtgttccaggcttccatggattcacagcagtttgtctcattacaacattttgttttggctggttgtggatccccggagcaacatggatggtattacagatactgaaaattatagtcctttttataacaaatagtactatggatcagagatttaaacgtattttgacaaaaataaaggcagagtataggtctactattggtgatacaagttgtgattactgcaagcatgaatgtgcaacaaatttggaggcagacaaccatattatgtactgcaaacaaggcaaatgcccttactgtttaaatgaagtctaccactcacctgctgctttacaagaacattttaaaatgtgtcctctcaccgatagattcaataaaacaataaaagatcaaatccttaagacaagcacgaagccacatagtagcttgtataaaaaattatgtgtgttcagatataccaatagatgctacatctttacagtatgggttacacttttattttttcagcttgttatctgggctgcaagtgcagaagtgatgaacttggagccagaatggaatgataatgtccacggagttggtgtgcataaaatgacaacagatgttgaactagatttttccataccttcttcctcaaaatttacatataagcgattcttggaaagccctgtaggtgagactaagatgcaatttgccttaaaaatatctcaacagaaaacaatagcatcaattcaaaagctaggtcattgggttgacgcacgctggaatactaggacagtgttccattgctatggggcctgctctaaatttgaatatccgtggaagagtgcaacatgttcgaaagaacatgattttgaataccaaacagcctgggcgtgtaacccaggagattgccctgggattaacacaggatgcacagcttgtggcctttatctggataaaccaaaatctatagctactgttataaagctcattcaaatagactatgagagggaagtttgtgttcagctaggtaactataatgagtgtaaacgagttactggaaatgactgcttaagcacaaatggagttaaagtctgtcttctaagcaccactgtcaaacttgggtcaacagacacattagttttctttgggccacttcaaggaggtgcagttgttttcaaaaattggtgcacgagtagctgtgtctacggggaccctggagatgtcatgctaacagaaaatggggaatacaactgccctgattttaatggaaactttgagagaatttgtagatttgcacagactcctgtttgtgagtatgggggtaacacagtttcaggctatcaacgatatcttgctactaaggattcttttttctcaatcaatatgactgacccaattctagagaggagcaagcttgaatggtatgaccctgatgcaacatcccgtgatcacattaatgttcaaataacaaaggacctagatttcgaaaacttgggtgaaaatccctgtagagtaactcttaaagtcctgagcattgacggggcatggggttcagagacaggattttcactaaattgtaaagtctcattgcttgaatgtaatagctttattactgttataaaggcatgtgataaagccatgtgttatggtgcaagctcacagacccttcagcgtggtgataatacagtaacaatccaagggagaggtggacatagtgggtctaagtttaaatgttgccatgaagaagactgtgctgaggaaggcttacttgctgaggctccacatctagcaagagtaaaatctgttgatgttgatacaagtgagatttactcagatggttctggagaatgtcggatcacatgctggttatctaaaactagtgaatggttcatggggattttatcaggtaattggttggtcattgtagtattagtggtaataatgatactcagtattatgctgttaagctttttttgcccaagtaagaaacatcaggcttaa

SEQ ID NO: 14960 - DNA, 72 bp, unidentified; identical to SEQ ID NO: 7796
  source 1..72: mol_type = other DNA
  misc_feature 1..72: note = Synthetic

SEQ ID NO: 14961 - DNA, 111 bp, unidentified
  misc_feature 1..111: note = Synthetic
  source 1..111: mol_type = other DNA
attatggtgtcagtgatgctgaatatgtctggggaaaagttaaaattgggcgttttacaatcgatgatattaagcatatccaatttgaaaatacctgccctttttccataa

SEQ ID NO: 14962 - DNA, 363 bp, unidentified
  source 1..363: mol_type = other DNA
  misc_feature 1..363: note = Synthetic
ttgtggcgccagaactgtatgtggagcatgtgctgggtgttgcgcgcacatttggggctgctcttctgggtggccgtgattgagctatgtgcggccagcggtcctgccaccatcatggcctcggattgttgcgagaattccctgtccagtgccagattgccaccggataagctgatatgcgggtggtactggacgtccaccgtgtattgtcgccagaaggcagtcatttttgtaacgcactcggggcggaaagtatgcgggtcgcctgcgaagcggcgcacgcgtcttctgatggagaagcacacggagatacctctcgcgaagcgcgtagcgcttcgcgccggtaaagggttatgcccctag

SEQ ID NO: 14963 - DNA, 363 bp, unidentified; identical to SEQ ID NO: 14962
  misc_feature 1..363: note = Synthetic
  source 1..363: mol_type = other DNA

SEQ ID NO: 14964 - DNA, 39 bp, unidentified; identical to SEQ ID NO: 123
  source 1..39: mol_type = other DNA
  misc_feature 1..39: note = Synthetic

SEQ ID NO: 14965 - DNA, 675 bp, unidentified; identical to SEQ ID NO: 14001
  misc_feature 1..675: note = Synthetic
  source 1..675: mol_type = other DNA

SEQ ID NO: 14966 - DNA, 66 bp, unidentified; identical to SEQ ID NO: 7802
  misc_feature 1..66: note = Synthetic
  source 1..66: mol_type = other DNA

SEQ ID NO: 14967 - DNA, 24 bp, unidentified
  source 1..24: mol_type = other DNA
  misc_feature 1..24: note = Synthetic
atgaagacccatctgaaacaatga

SEQ ID NO: 14968 - DNA, 24 bp, unidentified
  misc_feature 1..24: note = Synthetic
  source 1..24: mol_type = other DNA
atgaagacccatctgaaacaatga

SEQ ID NO: 14969 - DNA, 3423 bp, unidentified
  misc_feature 1..3423: note = Synthetic
  source 1..3423: mol_type = other DNA
atggtagggtgggtttgcatcttcctcgtggtccttactactgcaactgctgggctaacacggaatctttatgagttgaagatagaatgtccacatactgtgggtttaggtcagggttacgtgacaggttcagtggaaattacacctattctcttaacgcaggtagctgatctgaagattgagagttcttgtaatttcgatttgcatgtcccggctaccactacccaaaaatacaatcaggttgactggaccaaaaaaagttcaactacagaaagcacaaatgcaggtgcaactacatttgaggctaaaacaaaagagataaatttgaaaggcacatgtaatattcctccaactacatttgaagctgcatataaatcaaggaagacagtaatttgttatgatttagcctgtaatcaaacacattgtcttcctacggtccatttgattgctcctgttcaaacgtgcatgtctgtgcggagctgtatgataggtttgctgtcaagcaggattcaagtgatatatgagaagacatactgcgttacaggtcaattaatagaggggctatgtttcatcccaacacatacaattgcactcacacaacctggtcatacctatgatactatgacattgccagtgacttgttttttagtagctaaaaagttgggaacacagcttaagctggctgttgagttagagaaactgattactggtgtaagttgcacagaaaacagctttcaaggttactacatctgttttatcgggaaacattcagagcccttatttgtgccaacaatggaggattataggtcagctgagttatttacccgtatggttttaaatccgagaggtgaagatcatgaccctgatcaaaatggacaaggtttaatgagaatagctgggcctgttacagctaaggtgccatctacagaaacaactgaaacaatgcaaggaattgcatttgctggagcaccaatgtatagctctttctcaaccctcgtgaggaaggctgatcctgagtatgtcttctcaccaggtataattgcagaatcaaatcatagtgtttgtgataaaaaaacagtaccccttacatggacagggtttttggcagtttctggagagatagagaaaataacaggctgtacagtcttctgtacattggctggacctggtgctagttgtgaagcatactcagaaacaggaatctttaatataagttctcctacttgtctagtgaataaagttcaaaaattcagaggctcagaacagaggattaacttcatgtgccaaagagttgatcaagatgtagttgtctattgtaatggacaaaagaaagtcattcttaccaaaactctggtcataggccaatgcatttatacattcactagtttattctcactaatcccaggagttgcccattctcttgctgtagagctatgtgttccaggccttcatggctgggctacaacggcattactgattactttttgctttggctggctccttataccggcagtcaccttaattatactgaagatcctgaggttgctcactttctcatgctcacattattccacagaatcaaaattcaaagttatcttagaaagggttaaggttgaatatcagaaaacaatgggctctatggtgtgtgatatttgccaccacgaatgcgaaacagcaaaagaacttgaaacacataagaaaagctgtccagaaggtcaatgcccgtattgtatgacaataactgaatccactgagagtgctctccaagcccattttgcaatctgtaagctaacaaacaggtttcaggaaaacttaaaaaagtcattgaaacgcccagaagtacggaaaggttgttacaggacactgggagtttttagatacaagagcagatgttatgttggtttagtatggggaattcttttaacaactgaactgatcatatgggcagccagtgcagacacccctttaatggagtctggttggtctgacacagcacatggtgtgggcataattcctatgaagacagatttggagcttgattttgcattggcctcatcatcttcttacagttataggcgaaagcttgttaatcctgctaatcaagaagaaacactcccttttcatttccagttagataaacaagtagtgcatgcagagatccagaacctaggacattggatggatggcacattcaacataaaaactgcttttcactgttatggggagtgtaaaaaatatgcctatccttggcaaacagccaagtgtttctttgaaaaggattatcaatatgaaacaagttggggctgtaatccaccagactgtccaggggtaggtacaggttgtacagcttgtggggtgtaccttgataagctccgttcggttgggaaagcgtacaagatagtatcactcaaatatacacggaaggtgtgtattcaattaggaacagaacaaacttgtaaacatatagatgtaaatgattgcctggttaccccttctgtcaaagtttgtatgattggtactatatcaaagctccagccaggtgataccttgttgttcttaggtcctttagagcagggtgggatcattcttaagcaatggtgtacaacatcatgtgtgtttggagatcccggtgatattatgtcaacaacaagtgggatgcggtgcccagaacatactggatcttttagaaagatctgtgggtttgctacgacaccaacatgtgagtatcaaggcaacacagtgtctggattccaacgcatgatggcaactcgagattctttccagtcattcaatgtgacagaaccacatatcactagcaaccgacttgagtggattgatccagatagcagtatcaaagatcacattaatatggttttaaatcgagatgtttcctttcaggatctaagtgataacccatgcaaggttgacctgcatacacaatcaattgacggggcctggggttcaggagtaggttttacgttggtatgtactgtggggcttacagagtgtgcaaattttataacttcaattaaagcatgtgattctgccatgtgttatggagccacagtgacaaatctgcttagagggtctaacacagttaaagttgttggtaaaggtgggcattctggatctttgtttaaatgctgccatgatactgactgtaccgaagaagggttagcagcatctccaccacatttagacagggttacaggctataatcaaatagattctgataaagtttatgatgacggtgcaccgccctgtacaatcaagtgctggttcaccaagtcaggtgaatggctgttgggaatccttaatggcaattgggtggtagttgctgttctgattgtaattttgatattatcgatactcctttttagctttttttgtcctgtcagaagtagaaagaataaagctaattag

SEQ ID NO: 14970 - DNA, 6456 bp, unidentified
  source 1..6456: mol_type = other DNA
  misc_feature 1..6456: note = Synthetic
atggaaaaatacagagaaattcatagggatctacaatcctttccagttgggtcactgacagcagtagagtgtatagactacctggatcgtctctatgcaataaggcatgacattgttgatcagatgataaagcatgactggtcagataacaaggattcagaggaatctataggaaaggttttgctgtttgctggggtgcctaataatgttataactgcaatggaaaaaaagatcattcctgaccacccaagtggtaaaacacttcgttccttcttcaagatgacacctgataattataagattacagggtcaacgattgagtttgtagaagtaacagttactgttgatgttgacaaaggaatcagagagaaaaggctcaagtatgaggcagggctaaagtacattgaacaagaactgcataatcattttcttagaggagatattccacaaccttataagataacatttcaggttgtctccgttagaacagatggttctaatatctctacacaatggcctagccggaggaatgatggtgttgttcaatacatgaggcttgtacaagctgaaattagttatgttcgagagcacttgatacggcaggaggaaagggctgctctagaagcaatgttcaatctaaaattcaatataagcaacataaaaaatcaaccatattatattcctgattacagaggaatcccattaatacatccaaatattaatgacttagttgtatacatgagggattggttatcaaaaagccataaattttcatttcatgagggaaaggtccctgctgtgtttgactgttttaatgagaatgaacttgagcatgctgttaaatatcctatttcaaggcatccaaggaactttttattgatccagtgctcactactgtcatcctacaacccagctacaatcctttctgatcaggtcgacagcagacgggcatgtaactctgtgttgaacttgatccctgaaacaccaacctccttcttaatacatgatatggcatataggtatatcaatttgacaagagaagatatggtttcattttatgcacccaaaacccaattcatacccacacagaatgtaaaagaacctggaacttttaagctgactgctaactcgatgaggcctgagtcaaaggcaatgttagacatgttgggtagccatgagcctggtgaaaagaaaggtgccctaattgagagtttaaacctaagcagccatatagtacagtctgaatgcgtcagcctgattactaaaatactttctgaccttgagctcaacataagtgaacccacaagtcatggctcctttacaactaaacatacatatgtagataatgttcttgagaagttttttcaaaatgaaattcaaagatatttattagatgttctaaaaaagacaactgcatggcatattgggcatctcattcgggatataacagaaagcttaattgctcattcaggtctcaaaagatcaaagtactggtcagtacatgcatacaacaatgggaatgtcattttattcatactcccatctaaatcattggaggtagcagggtcttacataaggtttgtgacagtttttcgaatgggtccagggctagtcgataaagacaatctggatacaattctgactgatcaggatgttacctggggggtttcaaaggttatgagtattgatttgaacaggttactagcgctcaatattgcatttgaaaaggcattaattgctacagccacatggtttcaatactatacagaggatcaaggccagttccccctacaacatgcaataaggtcagtttttgcttaccatttgttgttagctgtgtgccagaagatgaagttgtgtgccatttttgacaacttacgatatttaatacctgctgttacatcactttactctggattcccctctcttataaataagttattcgagcgcccctttaagagtgctctggaagtatatgtttattataatattaagagtctacttgtggcccttgcacaaaataacaaggctagattttattcaaaagtaaaacttttaggtctaacagtagatcaatcaactgttggagcaagtggaatctacccgtcattcatgtcccgtgtcatttacaagcactaccgtagcttaatatcagaagtaacaacttgtttctttctgtttgaaaagggtttacatggtaacatgaatgaggaagcaaagattcaccttgaaactgtggagtgggccctaaaatttaggcaaaaagaagaccaatatggagaatccatggttgaaaatggttacacaataggtgaactcaatgataatcaagatttagttgaacaacaactatattgtcaagatgctgtagaacttgctgctgtagaacttaataagattttatcaacaaaatctcaggttgttgccaatagcattcttaataaatattgggaggttccgtattttagtcagactaggaatataagtttaaaggggatgtcaggccaagttcaagaagatggacatcttgctgcatctgttacaatcatagaggcaatacgttatctctcatcttcacagaacaatccaagtgttctacaactttatgaagagactagaaaagtgaaagctcaagcacgaattgttagaaaatatcagagaacagaggctgatagaggtttttttattacaacactcccaacacgatgtaggttagaaataattgaagattattacgatgccatctcaaaaaatgtggctgaagagtacatctcctatggtggtgaaaggaaaattttatgtattcaatcagctttagaaaaagcacttagatgggcttctggagagagctttattgaacttagcaacggaaagtttataaggatgaaaagaaaattgatgtatgtgagtgctgatgcaacgaaatggtctcctggagataactcagctaaattcagaagattcacagcagctctacataatggactacctgatgaccgtttaaaaaattgtgtaattgatgcattaaggaatgtttacaaaactgacttctatatgtccaggaaattaagggcttatatagataacatgaatgggcatgagccagctgttaagaatttcctggaattcttccctgatggtcattgtggagaagtgcggggcaattggttgcagggaaatctaaataagtgttcatctctttttggtgtaggaatgtcgttgctatttaagcaactttggaatgaattattccctgaattagactgcttctttgaatttgctcaccactcagatgatgcgctctttatatatggttaccttgaaccaattgatgatggaactgattggtttctatatgtgtctcaacagatccaagcaggtcatttacactggtttagtgtgaacacagaaatgtggaaaagtatgttcaatctgcatgaacacgtacttctcctaggttccataaagatatcccccaagaagacaacactatcaccaactaatgcggaattcctctctacgttctttgaaagctgtgctgtgtcaataccctttatcaaaatattgttaggttctctatcagatttgcctggtttaggttactttgatgaccttgctgctgctcaaagtagatgtgtcaaagcaatggaccttggtgcatcaccacaagttgcccaacttgctgttgcactatgcacaaataaggttgaaagattatatgggacagctgttggtatgataaaacatccatcaacatatcttcaagtcaagcatggtgatacacctattcctctaggtggaagtggtgccatgtcaataatggagctagcaactgctggtattggtatgtctgataaaaatctcttaaaaagggcacttttaggctacatacataaaaggcaaaaaaatatggcatatattcttggcctttttaaattcttaatgaacttatcaaaagatacattccagcatgaaagattgggtgagttttcattcatagggaaagtgcaatggaaaatatttataccgaaatcagagtttgagttttttgacatgtacacaccaaaattcttaaagctatggagtgaacaacatgttacttatgattacattattccaaagggtagagataatctattaatctatcttgttaggaaaataaatgatccaagcatagtcactgctatgacaatgcaatcaccactccagttaagattcagaatgcaagcaaagcaacacatgaaagtttgcaaattggatgatgactgggttacatttagggagatcttagctgcagcaaatagttttgcacaattgtatgaggtaactcaagaagatcttgatctttttcagacactaacaagttgtacattttcaaaggaatatgcatggaaagatttcttgaatggggtgcagtgtgatgttattcctacgaagcagatccagagggcaaaagtggccagaacattcactgtgagagaaaaagatcagatcattcaaaatagtatcccagctgtgattgggtataaatttgcagtaacagttgatgaaatgtcagatgttttggattctgcaaagttccctgactctctagctgtagatctgaagacaatgaaagatggggtttatagggaacttgggttggatatctcacaggctgaagtaatgaagaaggttgcacctatgctatataagagctcaaagtcaagggttgttattgttcaaggaaatgtggagggcacagcagaggctatctgtggttactggttacgtaccatgtcccttgtgaaaactattagggttaaaccgcataaagaagtattgaaagctgtatccatctttaacagaaaagaggatattgggcaacaaaaagaccttgctgcattgcgattgtgcatagaagtttggcgctggtgtaaagcaaataatgcaccctatcaagaatggtttcatgctctgtggtttgaagacaaaacattttctgagtggcttgatagattcatccgtgtcggtgtccctccagtggacccagagatccagtgtgctgcactaatgattgcagatatcagaggtgatctatctgtcctacaagtacaggcaaatagaagagcttattcaggtaaacaatatgatgcctattgtgttcagacatataacgaagaaacaaagctctatgaaggtgaccttcgagtcacattcaattttggactagactgtgcccgccttgaaatattctgggacaaacaaacatacatccttgagacttcaataacacaaaaacatgttttgaagatcatgatggatgaagtaacaaaagagttgttaaggtgtggaatgaggtttaaaactgaacaagtgtctaatgtgaaacacctagttttgttcaagacagaggcaggttttgagtggggaaagcctaatattccttgcattgtatataaaaactgtgcactacgtacaggtttaagagcaaaccaaactgttaaccacaaattcatgatatcaattaaggataacggccttagagctattgcacaatatgatgatgaaagtcctcggtttttacttgcacatgcatttcatacaataagggatattagataccaggcagtagatgctgtaagtaatgtgtggtttatccataaggggataaaactattccttaacccaattatttcatcaggtttattagaaaatttcatgaaaaatttaccagcagcaatacctcctgctgcatactcattaatcatgaatagagctaagatatctgttgatctattcatgttcaatgatttacttaggctcatcaacccatcaaatacgcttgacctatccggtttgcagccaactgaagatgggtttagcactgtaagcagtatgtcaagcagattatggtctgaagaggttagttttgttgatgaagatgaagagattgatgatgagttcacaatagacttgcaggatgtggattttgaaaacattgatgtggaagctgatattgaacatttcttacaagatgaaagttcatatacaggtgacttactcattatgtcagaagaaactgaagtcaagaagatgagaggaattataaaactgctagagcctgttagacttataaaaagctgggtttccaaaggtttatgtattgagaaggtatatagcccaaccaatattatattgatgactagatatctttcaaaaaatttcaatttttctggtagacaagtttcccttttagacccatatgacttgactgagtttgaaagcattgttaaaggttggggagaatgtgttgttgatcagttcagtacatttgatcaggagacacagcttttggtatctcagaaaggcatctgcccagaggatgtggtacctgattcccttttttcatttaggcatactatagttctcttacgtagactttttcctcaggactctgtttcaactttctactaa

SEQ ID NO: 14971 - DNA, 39 bp, unidentified
  misc_feature 1..39: note = Synthetic
  source 1..39: mol_type = other DNA
atgactggtcagataacaaggattcagaggaatctatag

SEQ ID NO: 14972 - DNA, 3408 bp, unidentified
  misc_feature 1..3408: note = Synthetic
  source 1..3408: mol_type = other DNA
atgatcatgtggggtttactattgacaatgattttgatcgattttggggcatccttaaggaatgtctatgacatgaaaatagaatgcccacattcaatcaactttggggagagtagtgtaacaggtaaggtggagctgccaccccttctgcttacagatgcagaggccttggtcccggaaagttcttgtaacatggacaaccatcagtccatgtcaattatacaaaaagtgacaaaagtaagctggagaaaaaaggcagacaaagcccaagctgccaaggactcatttgagacaacatcaagtgaggttaacttaaagggaacatgtgcattgagtcataggatggttgaagaatcttacagaaataggagatcagtaatatgttatgacttgtcttgcaattcaacacattgcaagccaacgatgcatatgattgtacctgtgcactcatgcaacatgatgaaaagctgcctggttgggcttgggccttatagaatccaaatcgtctatgagagaacctactgtacaactggtatactaacagaagggaagtgttttgtgccagaccagagtattgttaatgttatcaagaatggggtgttcgacatcgcaagtgtgagcattgtctgttttttcatcagagttaaagggaccaactacaagataatggcaagtattaaaacagcaactgcaaataactgtaatgacactgacaacaaggttcaaggatattacctttgtattgtcgggggaaattcttctcctgtgtatgcaccttcaaccactgattttagatctatggaggcacttgctagccttttaagagctcctcatggtgaagaccatgatttatctggagaagaggtggcaacttactcaattgccgggcaaattgaaggcaaaatcccacatactgcaaatgcagcaaacatgctgtttactgcattctcaggaatccctagttactcttcattaagtgtttttatcggaagtcaggacggacctgttatatatagcccaggattgtttcctaggttgaaccaatcttcatgtgataagattgcactaccattaatatgggaaggatatatagatctgcctggctattatgaaacagttcacccatgtaatgtcttttgtgtgttatctggcccaggggcatcatgtgaggcattctcagaaggtggtattttcaacattacatcccctacttgccttgtgtcaaagcaaaataggttcagagctgctgagcagcaagtcaactttgtgtgccagcgagttgaccaagatattgtcatctactgtaatggacaaaagaagacaattttaactaagacattagtgattgggcagtgtatttactcagtgactagtttattttcaataatgcctggggtagcacattcaattgcaattgaattatgtgtaccagggttccatggttgggcaactgctgctcttctcactacattctgctttggctggatactgatcctttccattacattagctgtgttggttgtcctgaagttttttgccgcaatcttacataatagctctcaagaaaaccggtttaaaattatcttaagaaagattaaagaagaatttgaaaagactaaaggctcaatggtctgtgaagtgtgcaagtatgagtgtgaaacagggaaggagcttaaagcccataatttatcttgccctcagtcacagtgtccttattgctttacacactgtgagcctacagaatctgcctttcaagcacattataaagtgtgccaagcaacacacagatttagggatgatttaaagaaaacaataacacctcaatcaacaagcccaggttgttaccggacattaaatctttttaggtataaaagtagatgttacatctttacagtgtgggtgaccttactaatcattgaatcaatcatgtgggcagctagtgcatcagaaactgtcttggagccaagctggaatgacaatgcacatggtgttggcgttgtcccaatgcatactgacctggaacttgatttctctcttccatcaagttctaagtacacatataagagaaaactgacaagtccattgaatcaagaacaatcagtagatcttcacatagagatagagagtcaagggatctctacaagtgttcatgcattaggtcattggtttgatggaaggcttaacctaaagacatcttttcattgttatggtgcatgtactaagtatgaatacccttggcacacggcaaaatgccactttgaaagagatttcgaatatgagaacaattgggggtgtaatcctgctgattgccctgggattggtactggctgtactgcatgcgggctatacattgaccagcttaaacctgtaggcagtgcatataagctgatcacagtccgttacagccgtaaagtatgtgttcagtttggtgaagaaaatctatgcaagacaattgatatgaatgattgctttgttacaagacatgttaaagtatgtatcatcggtacagtttcaaagttctcgcaaggtgataccctagtattcctaggccctatggaaggtgggggtttgatatttaaggattggtgcactagcacatgccaatttggtgatccaggagacattatgagtcctaaagacaaaggtttcagctgccctgacttcacaggccatttccggaaaaaatgcaactttgcaacaacacctgtgtgcgagtatgatggtaatatggtctctgggtataagaaagtaatggcaactattgattcctttcaatcatttaacactagttcaattcattatacagatgaaaggattgagtggaaagacccggatggaatgcttaaggaccaccttaatatacttgtcacaaaggatattgactttgaaaaccttggagagaacccgtgtaaagtaggacttcaaacatcatcaatagaaggtgcatggggttctggggttggtttcactctcacttgtcaaatctcactgacagagtgttcacgctttctaacatcaatcaaagcatgtgacatggcaatttgttatggtgcacaaagtgttacactcattagaggccaaaacacagtgaaggtttccgggaagggtgggcatagtggctcttcattcaagtgttgccatggaacagattgctctcaacaggggctacaagcaagtgcaccgcacctggataaggtcaatgggattgttgaacaagagagtgagaaggtttatgatgatggtgcaccacaatgtggcatttcatgctggtttgttaagtctggggagtggataacaggaattttcaatgggaattggattgtcatagttgtgcttgttttcttcttcatattgtccttaatcttacttagtcttctatgtcccattcgtaagcataaacgctcataa

SEQ ID NO: 14973 - DNA, 3417 bp, unidentified
  misc_feature 1..3417: note = Synthetic
  source 1..3417: mol_type = other DNA
atggaagggtggtatctggttgttcttggagtctgctatacgctgacactggcaatgcccaagaccatttatgagcttaaaatggaatgcccgcacactgtgggtctcggtcaaggttacatcattggctcaacagaactaggtttgatctcaattgaggctgcatctgatataaagctcgagagctcttgcaattttgatcttcatacaacatctatggcccagaagagtttcacccaagttgaatggagaaagaaaagtgacacaactgataccacaaatgctgcgtccactacctttgaagcacaaactaaaactgttaaccttagagggacttgtatactggcacctgaactctatgatacattgaagaaagtaaaaaagacagtcctgtgctatgatctaacatgtaatcaaacacattgtcagccaactgtctatctgattgcacctgtattgacatgcatgtcaataagaagttgtatggctagtgtgtttacaagcaggattcaggtgatttatgaaaagacacattgtgtaacaggtcagctgattgagggtcagtgtttcaacccagcacacacattgacattatctcagcctgctcacacttatgatactgtcacccttcctatctcttgttttttcacaccaaagaagtcggagcaactaaaagttataaaaacatttgaaggaattctgacgaagacaggttgcacggagaatgcattgcagggttattatgtgtgttttttagggagtcattcagaacctttaattgttccgagtttggaggacatacggtctgctgaagttgttagtaggatgcttgtacaccctaggggagaagaccatgatgccatacagaattcacaaagtcacttaagaatagtgggacctatcacagcaaaagtgccatcaactagttccacagataccctaaaggggacagcctttgcaggcgtcccaatgtatagctctttatctacactagtcagaaatgcagacccagaatttgtattttctccaggtatagtacctgaatctaatcacagtacatgtgataagaagacagtacctatcacatggacaggctacctaccaatatcaggtgagatggaaaaagtgactggatgtacagttttttgtacactagcaggacctggtgctagttgtgaggcctattctgaaaatggtatatttaacatcagttctccaacatgtcttgtaaacaaagtccaaagatttcgtggatctgaacagaaaataaattttatctgtcagcgggtagatcaggatgttgttgtatactgcaatgggcaaaagaaagtcatattaaccaaaactttggttattgggcagtgtatttatacattcacaagcctattttcattgatgcctgatgtagcccactcattggctgtagaattatgtgtcccgggattacatggatgggccactgtcatgcttctatcaacattctgctttgggtgggtcttgattcctgcggtcacattaataatattaaagtgtctaagggttttgacgttttcttgttcccattacactaatgagtcaaaatttaaattcatcctggaaaaagttaaaattgaataccaaaagactatgggatcaatggtgtgcgatgtatgtcatcatgagtgtgaaacagcaaaagaacttgaatcacatagacagagttgtatcaatggacaatgtccttattgcatgacaataactgaagcaactgaaagtgccttgcaagcccattattccatttgtaaattgacaggaagatttcaggaggcactgaaaaagtcacttaaaaagccagaggtaaaaaaaggttgttacagaacactcggggtatttagatataaaagtagatgttatgtgggtttggtatggtgcctattgttgacatgtgaaattgttatttgggccgcaagtgcagagactccactaatggagtcaggctggtcagatacggctcatggtgttggtgagattccaatgaagacagacctcgagctggacttttcactgccttcttcatcctcttacagttataggagaaagctcacaaacccagccaataaagaagagtctattcccttccacttccagatggaaaaacaagtaattcatgctgaaatccaacccctgggtcattggatggatgcgacatttaatattaagactgcatttcattgttatggtgcatgccagaaatactcttatccatggcagacatctaagtgcttctttgaaaaggactaccagtatgaaacaggctggggctgtaatcctggtgactgcccaggggttgggactggatgcactgcttgtggtgtttatctcgataaactaaaatctgttgggaaggcctataagataatttctttaaaatataccagaaaggtttgtattcagttaggaacagaacaaacttgcaagcatattgatgcaaatgattgtttagtgacaccatctgtgaaagtttgcatagtgggcacagtttcaaaacttcaaccatctgatactcttttgttcttaggtccactagaacaagggggaatcattcttaagcaatggtgcacaacatcatgtgcatttggggaccctggtgatatcatgtccactcccagtggtatgaggtgtccagagcacactggatcatttaggaaaatttgcggttttgctactacaccagtttgtgaatatcaaggaaataccatttctggatataaaagaatgatggcaacaaaagattcattccaatcatttaacttaacagaacctcacatcacaacaaacaagcttgaatggatcgacccagatgggaatacaagagaccacgtaaaccttgtcttaaatagagatgtctcatttcaggatttaagtgataacccctgtaaagtagacctacacacacaagcaatagaaggggcatggggttctggtgtagggtttacactcacatgtactgtcggattaacagagtgcccaagttttatgacatcaattaaggcatgtgacctagctatgtgttatggatcaacagtaacaaaccttgccaggggctctaatacagtgaaagtagttggtaaaggaggccattcagggtcctcatttaaatgctgtcatgatacagattgctcctctgaaggtttacttgcatcagcccctcatcttgagagggtaacaggattcaatcaaattgattcagataaggtttatgatgatggtgcaccaccttgcacattcaaatgctggttcactaagtcaggtgagtggcttcttgggatcttaaacgggaattggattgttgttgtagtgcttgttgtgatactcattctctctatcataatgttcagtgttttgtgtcccaggagagggcacaagaaaactgtctaa

SEQ ID NO: 14974 - DNA, 33 bp, unidentified; identical to SEQ ID NO: 1
  misc_feature 1..33: note = Synthetic
  source 1..33: mol_type = other DNA

SEQ ID NO: 14975 - DNA, 1290 bp, unidentified
  source 1..1290: mol_type = other DNA
  misc_feature 1..1290: note = Synthetic
atggcaacattagaggaactccaaaaagaaatcaacaaccacgagggccaattggtgatagccaggcagaaggtgaaagatgcagaaaagcagtatgaaaaggatcctgacgacctgaataaaagggcattgagtgaccgggaaagcattgcacaatcaattcagggaaaaatagatgaattaaggagacagctggctgatcgtgtggcagcagggaaaaacattggcaaagagagggacccaactggactagaccctggagatcacctcaaagagaagtcaatgctcagttatggaaatgtcattgacctcaaccatcttgacattgatgaacctacagggcaaaccgcagactggctgagcattgtggtctacctgacatcattcgtggttccaatattgttgaaggctctttacatgcttaccaccagagggagacaaactactaaagacaataagggaatgagaattcgatttaaggatgacagctcttttgaagatgtgaatgggattagaaagccaaagcacctgttcttgtcaatgcccaatgcacaatctagcatgaaggcagatgagattacaccaggtcggttcaggactgcaatttgtggactatacccagcccaggtgaaggcaaggaacttaatcagtcctgtgatgagtgtgattgggtttttagcccttgcaaagaactggacagagcgggttgaggaatggcttgacctcccgtgcaagctactatctgagccatctccaacgtctttgaccaaaggcccatccaccaatcgtgactacttgaatcaaagacaaggagcgcttgcaaaaatggaaacaaaagaagctcaggctgtgaggaaacatgccatagatgctggctgcaaccttatcgaccatatagactcaccatcatcaatctgggtctttgcaggagcacccgacagatgccctcctacctgcctgttcattgcaggcatggcagagctaggtgcattctttgctgttctccaggatatgaggaacaccatcatggcgtcaaaaactatcggaacatctgaggagaagctaaagaagaaatcatctttttaccaatcttacctacggaggacacaatctatggggatacaactggaccagcgcatcatcgtgctcttcatggttgactggggaaaagaggcagttgatagttttcatcttggtgatgatatggatcctgagctccggggcctggcacaggcattaattgatcaaaaagtgaaggaaatatctaatcaggaaccgcttaagctttaa

SEQ ID NO: 14976 - DNA, 6450 bp, unidentified
  misc_feature 1..6450: note = Synthetic
  source 1..6450: mol_type = other DNA
atgcagaaatattacgaaatcagggacaaagtccatggcattgagccaggcacaataggggcagtagaatgtattaatttgctagattcactctacatggttcgtcatgacctaattgatgagatgattaaacatgactggtcagataacaaggataaggaaacaccaatagctgatgtgctgctgaaggccggaatcccagctgaagttataaatggaatggagaaagtgaggatagttgatcatcccgccggaaaaacacttaaacagttttttaagacaacacctgataattataaaattaatgataatgtgattcattttattgaggttacagtcacagttgatgttgaaaaagggatttatgaaaagaatcaaaaataccaaggtggcttaaatcaaatacaacaagaattagataaagcctggcaacagggtaaacttcaacgaaagtttgaggtgaagtttgatattgttgccgtgaaggctgatggttcaaatttatcaacacaatggcctagcacaagatcacaaggtgttgttcaacatatgcgaatggttcaagctgaaattcaatatgtgagagataaattactaagcacacaagaacgtggaacttttgaatccatgttcaacctgaaatttcatacacatactgaacgggatttcaagtattcgcttccatcttatgaggatgttgaagattgtaatgcaaatttggatgagttgctggatcatgtgaaagaatggctaacaaagaagcagtcattttccttccatgaagtcacaggagaaaagattgcaagatcatttgaaacatatgagaaggagcaacaagggttgtatcctaagtcacaaaagcctaggaacttcctcttactgccagtgggtatccaatcagagtataaacctatgacaatatatatgtcacaggttgataccaaattagtagctaatatcattttaagtgagctccctgaaacccctttacaatcactagtaaaagatatctgttatagctatatgatgttggataatgtcgagatcaataactattatagtcctatacatatttttgaaaaaaccaagaacataccacagcctggttgtcttaaaataaacattagcctgtttgatgaaggagctaaggctattttgaatcagacaaaacaagagtcaaaaggtgttcagcctatagaaagcttacatccatggaatcactctgaatcagttacatgtatgagtacaattgagcacatattatcacagttagagattaatgtaggggttgatcctgatgatataactacatatagaaaaagatcacctgttgatacgctgttagggaggtttatgcaaagtgaaactgagaaatacctaattaaagttcttaggaaaactgtgggttggcacatagggcatctaattagggatattactgaagcacttgttgctcatgctggtttaaaaagatcaaaacactattcaatagcaggtttccatcatgggaacgttttattggtgatgcttccatccaagtcattagaagtggcaactgcccatgtacgatatatcattatccataaagaaggttatggatttgttgatcctgataatattgactcaaagaaaattataaatggcacttgttggatttattcaaaaccaatgactattgacttgaatcgtcttctggcattgaacattagttttgagaaagctttccttgcaactgctgtttggttccaatactttactgaagatcaaagtatttttccccttcagtctactgtgaaatctgtgttttcataccagctattattggcagtaacacaaaagatgaaagtttgtgcattgttcgataaccttagataccttataccatcatgtacagctagttattcaggtgctgatagtcttattgaaaaattctgcaaacggccattcaagagctctatagaagtttatgtatataataaatcaaaggaacttctgataagcttagcacaaaacaacaaattccgttattactccaaggtaagacttctgggactgactgtagatcaatcaagtgtaggtgccacaggaatatatccatctttgatttgtcatactgtgtatagacattataagtcactgatttctgagataacaacatgcttttttctgtttgaaaaaggtttacatgggactatgacagaggaggcaaaaatccatcttgagactgttgaatgggcacagaaattcaaacaaaaagaatctgattatgggaaagatattgttgaaaatgggtatgacttggccatggttgtgaagaaagaaattataccagaacagcaactatattgtaaagatgtggttaaactagctacaattgaattaaataaagtattatcttctaaggggcaagtgatagcaaactctataatgtctaaatactgggagacaccttattttagccaaacacgcaatataagtttaaaggggatgtctggagaaatacaagaagacggtcaccttgcatctagttatacactaattgaagcaataaggtacttaaatactcataaaagaaacccaacagtattagagttatatgctgaaactaaagatatcagagctcaagcacgcattgtcagaaagcatcagaggacagaagctgatagaggtttctttataactacattaccaacaagggtacgtctagaaattattgaggattattatgattcaatttctaagaatgtccaagaagagtacatctcttatggtggtgaaaagaaaatcctccaaattcaaggttcattggagaaggcactaagatgggcatctgggaccagtgtcattactctctcaacaggagatcaaatcacatttaagagaaaattgatgtatgtgagtgcagatgccacaaaatggtctcctggggataattctgcaaaatttaggctattctcatcacacatccatgatgggctaaaggatagaagattaaagaggtgtgtaatagatgcacttagaggtatttatgaaactgaattctttttatccagaagacttaggggttacattgataatatgaattacctggaaatgaatgtgaaagagtttttatctttctttgatcatgttgaagagcgttctggcttagtgagagggaattggttgcagggtaatcttaataaatgttcatcacttttttcagttgctattagttttcttttcaaagaagtatggactcagatattccctgagctagattgttttatagagtttgcacaccattctgatgatgcactattcatatatggttatctggagcctgaaggtgatgcatcagactggttcttatatgttagccagaaaatacaagcagggcagttatattggtgttcagtgaatacagagatgtggaaaacaatgtttaatttacatgaatatttattgctacttggctctgttaaggtctcacctaaaaagacaacagtctctcctacaaatgcagaattcctatcaacattttttgagggttgtgctgtttcaattccattctctaagatattattaggtgcattgtcagatttaccaggtttaggtttttttgatgatttagctgcttcacagtcaagatgtgttaaagcccttgatatgggtgcatcaccacagattgcacagattgcagtcaacctgacgaactcaaaagtggaaagattgtatggaactgcatcaggcatggctaattacccgtgtaattttataaatgtaaatcgtgataaaatacctatttgtttaggtgggacaggttcatcatcaatattagatttagccaccgccgggataggtatgtcggacaaaataatcctaaaaaatgctttattaggttttaggcacaaacacaatcctgaagacacttatattctcgggatattcaaattcttaattacattaagtgaagaaacatttcaacatgagagtttgggggaattctctttcttaggtaaggttcaatggaaagtattcacaccaaagtctgaatttgaatatgcttctctatttggaaataaatttctcaatgattggagtcttgaacatcctgtgtatgattatattataccgcaggtacgagatgatctacttgtatatttagtacggaaattaaatgatccaagtattgtaacagcaatgactttacagtcaccactacaattgagatttagaatgcaggcaaaacaacacatgcctgtgtgcaaatatagaggatcatgggtgacttttagaaccatattaaatgcagcacatgagtttgctgtagaatacacaccaagcgagaatgaccttgatttattcaataccttagtttcatgtacattctcaaaagagtttgcatggaaagactttattgggaatacagaatgtgaagttattcaatcaaggaagattcaccgaccaaaagtggcaagagtatttactgttaaagaacgtgatcagattattcaaaatcctatatcagttgtaattgcatataaatttgcaaatacaacaagtgaaattaaggatgtgcttgataaagccaaattccctgactcattaagcagtgatttaaaaacattgcatgaaggtgtatatagagaactagggttaaatataaatgatccccttgtaatgaagcgtattgcaccaatgttatataaaacagggagatccaggattgtaatagtaaatgggaatgtagaagggacagcagaggcaatatgcacatactggctaagatcaatttcttttgttaagcagataaaaataataccacactgtgaggtgctaaaggctgtttcaatcttcagtaaaagtgactttgtaagggatgatacacaacttgctgcgttaaggctctgcattgatatttggagatggggaaaatataattatgttaaccttcatgagtggttttctgcactatggtttgaatcaaaaacactgtgggactggctatatcactttcagaggaaaggagtacctattgtagatcctgaggtgcagtgtgctggcttaatgatgtatgatatgctaagagatagcactacattacagcttcatgcaaataggcgtgcatattctggtaaacaatatgatgcatattgtactcaagtatataatgaagaaagtggcctgtatgaaggtgacttgcgtgttgtattcaattttggtgtagactgtgcaaggctagagatattctgggataaacagacctatgtccttgaaacctcaatcacaagtaagcctgtcttacgtgttcttatgcaagaagttacaactgagttacaaagatgtggtatgaagtttaatacaattcagagtactgggtatagatctgttgtactctttaagacagattcaggttttgagtggggtaaacctaatgttccatgtgttatatttttaaactgtgcacttagacctaacctgagaaacagacaagttttgaataaagattttatgataaatatattggataatggattcaaagcaatagctcaacaagatgaagaaagcaatagatttcaacttgcacatgcatatcataatcttaaggatgtgaggtatcaagctatagaaacaatgaataatgtatattttactcatgaagggaagcatttatatattaatccaataattgctgcaggtctacttgagaatttcatgaaaggactgccagctgtaattcccccccaagcatatagcttaattatgaagaaggccaaaataactgtagatctctttatgttcaataagctattatcattaattaacccaaaaaatgttttcaatatggatggaattgataatgactaccctgagtttagtacagtaacaagtctatctactaaggattgggcagaagaaaaagaacttgaggacgcagaagtagatgatgatgagtatgttgttgacctaaatgatattgattttgacaaagttgatacacttgcagacatccagcattttctacaagatgaatctgcatatacatctgatctaatcattgacacagaaccaacagaagcaaaaagagtaagagggattgtgaaattagttgaacctgtgaaattaataaagagttgggtatctaagggtttagctatagaaaaggtctataacccacttgcaattatattggtaacaaggtatttctcaaaacagtattcatttaataaagttccacttgctcaactggacccatacaaccttactgagcttgagagtattgtgaggggatggggtgagcttgtttgtgatagatttgatgaattagatcagcaagcacatgaatacattttaaagacaaaggaacctccacaaaatcttgttcctgactcgttgttttcttttaggcatgcagagctcctattttctaggttgtttttgccagatactgtctctgccttttattaa

SEQ ID NO: 14977 - DNA, 3471 bp, unidentified
  misc_feature 1..3471: note = Synthetic
  source 1..3471: mol_type = other DNA
aagaagaagcaaacacagacaaatatgggaaaatcgagtccagtttgtctgtatctgattcttcagggtctattactatttgatacagtaaatgccaaaaacctgaatgaacttaaaatggagtgtccgcacactattgggctaggtcaaggccttgttgtaggttcagtagaactaccacctgtcccaatacagcaaattgaatccttaaaattagagagttcttgtaattttgatttgcacaccagtacagcagggcaacagtcatttacaaaatggacatgggagacaaaaggtgatcttgcagaaaatacacaagcatcatcaacaagttttcagacaaaaagtagtgaggtcaatttaagaggtctgtgcttgatccctaccctagtggttgaaacagcagcaaggatgcggaagacaatagcatgttatgacttgtcatgtaatcaaacagtatgtcagcctactgtttatttaatgggacctattcaaacatgcttaacaaccaaaagttgtcttctgggtttaggagatcaacgaatccaggtaaattatgagagaacatactgtgtttcagggcagcttgttgaaggtgtctgcttcaacccaatacacacaatggccctctctcagccaagccatacttatgatatagtgaccataatggttcgctgttttttggtcataaaaaaggtgacatctggcgacagtatgaagattgaaaaaaactttgaaactcttgttcagaagactgggtgtacggccaatggttttcaaggatattacatctgtcttattgggagtagctcagagccattgtatgttcccacgctggatgattatcggtcagctgaggttctgtcacgaatggcttttgcaccacatggcgaagatcatgacatagaaaaaaatgcagtgagtgccttacgcattgctgggaaggttacaggtaaagcaccatccactgaatcatcagatacagtacaaggtattgcattttcaggcagcccactctatacatctactggtgtgctgacagcaaaggatgatcctgtatatgtctgggccccaggaattattatggagggaaaccactctgtctgtgaaaaaaagacactgccgttaacatggacagggttcatcccattacctggggagattgaaaagacaacacaatgcacggttttttgtactttagcaggaccaggtgcagactgtgaagcatattctgagacaggtattttcaatataagctcacctacttgcctgataaaccgtgttcaaagattccgtggtgctgaacagcaaataaaatttgtttgtcaaagagtagacatggatatcactgtatattgtaatggagtaaaaaaagtcatccttactaaaaccttagttattggacagtgcatttatacttttacaagtatcttttccatgattccaggaattgcacattctcttgctgttgagctatgtgtgccaggtcttcatggttgggctacagtattgcttttattaacattttgctttggctgggttctgataccaactattacaatgatcttgttaaaaatattaattgcatttgcatatctttgctctaagtataatactgattccaaatttagaattttggttgagaaagtaaaaaaggaatatcagaaaaccatgggctcaatggtttgtgaggtatgtcagtatgagtgtgaaactgctaaggagttagaatcacatagaaagagctgttcaattggttcatgcccttattgccttaatccatctgaggctacaccgtctgctcttcaagctcattttaaagtttgtaaactaacatcacggtttcaggaaaatttgaagaagtcactaacaatgtatgagccaatgcagggttgttatcgaacattatctctatttaggtaccgcagtagattttttgtaggtttagtgtggtgtatgttgcttgttttagagctaattgtatgggctgctagtgctgagacacaaaacttaaatgatggttggactgatactgcacatggatcaggaataatacctatgaaggctgatcttgaactggatttctcattaccttcatctgctagctatacttaccgaagacaattacaaaacccggcaaatgaacaagaaaaaataccatttcatttacagataagtaaacaggtgattcatgctgaaattcaacatctaggccactggatggatgctacatttaacttaaaaactgcttttcactgttatggttcatgtgaaaaatatgcctacccctggcaaacagcaggatgtttcgttgaaaaagattatgaatatgaaactggttggggttgtaatccccctgattgtcctggtgtagggacaggctgcactgcttgcggtgtatatctggataagttaaaatcagttggaaaggtatttaagattgtgtctttaagatatacaaggaaagtatgcattcagttgggtaccgggcaaacctgtaaaactgttgacagtaatgattgtttaataactacatcagttaaagtgtgcttgataggtaccatttcaaagttccaaccttctgataccctcttattcctcggtcctctccaacaaggtggtttaatttttaagcaatggtgtactactacatgtcaatttggtgatcccggagatataatgagtacacccacagggatgaagtgtccagaacttaatggttcattcagaaaaaaatgtgcatttgcaacaacacctgtatgtcagtttgatgggaatacaatttcaggttataaacggatggttgcaacaaaagattcatttcaatcatttaatgtaacagaaccacacatctctacaagtgcattggagtggattgacctagatagttcacttcgggatcacatcaatgtgattgtaagccgtgatttgtcctttcaggatttaagtgaaacaccttgtcaagtggatttgacaacatcagctacagatggggcatggggttcaggagttggttttaacctggtatgtactgttagtttaacagaatgctctgcatttttaacttcaattaaggcatgtcatgctgctatgtgttatggttctactacaacgaatttagttcgagggcagaatacaattcatgttgttggtaaaggtggacattctggttcaaagtttatgtgttgtcatgacacaaagtgctctagtacagggttagttgcagctgcaccacacttggatcgtgtgacagggtttaatcaagctgatagtgataagatctttgatgatggcgctccagagtgtggtatgtcttgctggtttaaaaaattaggagaatgggttcttggagtccttaatgggaattggatggttgtggctgtgttgatagcattacttatactatccatcttcttatttgcattatgttgtccacgcaggcccagttataagaaagatcataaaccttaa

SEQ ID NO: 14978 - DNA, 3453 bp, unidentified
  misc_feature 1..3453: note = Synthetic
  source 1..3453: mol_type = other DNA
ctgataaacaaggataaaatgagtagagtttgtctgtgtctgctcttctcgggcctactactatggagggctgcagaacttcgaaaccttattgagttaaaaattgaatgtcctcatacaattggattaggccagggcttggtcatcggttcagtcgagctaccacctgtgcctctaaacaaggttgagtcattaaaattagagagttcctgtaactttgatctccatacaagcacatcaacacagcaggctttcaccaaatggacatgggagaagaaaacagacctggcagatggcacaaaatcttcatccactagttttgtctcgaagagtgtggaggtcaacctgaggggtctttgtataattcctacgttggttctagagactgcatcacgaacgagaaagacggtcacttgtttcgacctatcttgcaatcaaactgcctgtcagcccacagtatatttaatagcacctatacagacatgtgttacaaccaagagctgcttgttgggtttaggggatcaaaggattcaagtcaattatgaaaaaacatattgtgtatcagggcagcttgttgaaggagtgtgttttaatcccatacacactatggcattatcccagccaagccatacatatgacatgctcacaatgatggtcagatgctttctcgttgcaaaaaaggtttctaatggtgataatatgaagattgagaaggaatttgagaagctggcccagaagacaggttgcactaataattttcaagggtattatgtttgtatcatcggaagcagctctgaggcactatatgttcctgcattagaagactacagatcagctgaagtactatccaggatgacatttgcaccccatggtgaagatcatgatattgaaaaaaattcaatcagtgcactccgggttgtgggaaaagtgacaggtaaagcaccttcaactgaatcatccgatacaattcaagggatagcatttgctggtgtgcctttctacacatccacaggtgtattaactgcaaaagaggacccaatatatgtctgggcaccaggcataataatggaagggaatcattcaacatgtgataagaagacattgccgttgacatggacaggatttatctctttgcctggtgaaattgaaaaaacaacacaatgcactgtcttctgcacattggcagggcctggagcagactgtgaggcctattcagacacagggattttcaatataagctcaccaacatgtttggtcaatcgtgtacagcggtttagaggtgctgagcaacagattaagtttgtttgccagagagtggatttggacataacagtttattgtaatggtataaagaaagttatcctgactaagaccttggtgattggacaatgtatatatactttcacaagtatattttctttattgcctggtgtcgcacattcattggctgtcgagctgtgtgtccctggtcttcacggttgggcaactattgctttacttttaaccttctgctttggttggctattgataccaataataaccctcgtctctattaaaatcttactactttttacatatgcctgctcaaagtataacacagactctaaattcaagatgctcattgagaaggtgaaacaagaatatcaaaaaactatgggttcaatggtttgtgaggtctgtcaacatgaatgtgaaacagcaaaggaactggaatcacacaaaaaagcttgtcccaatggttcatgcccttactgcttaaatcctactgaggccactgaatctgccattcaagcccattttaaagtctgtaaattaactacgaggtttcaggagaacttgaaaaaatcattgacagcctatgaaccaaagagaggttgccatcgggcactgtcaatttttagatatagaagccgttgctttgtgggattagtctggtgcatcctgttgactttggaattaattatctgggctgctagtgcagaggtagtcaatctagaacctggttggaatgacatggctcatgggacaggaattgtgcctatgcgtacagacttggaactagatttttcgcttccatcttcttctagctatacttatagaagagatcttcaaaatccagcaaatgagcaagagagagttcctttccacttacagattgaaagacaagtaatacatgcagaaattcaacacttaggtcattggatggatgccaccttcaatttaaaaacagcattccactgttatggtgcatgtgaaaaatatgcatatccttggcagacagctggctgcttcttagagagagatttcgagtttgaaaccggatggggttgtaatccaccagattgtcctggagtagggacaggttgcacagcatgtggagcatatcttgataagctgaagtctgtaggaaaggtttttaaaattgtatctcttaaatacacaaggaaagtatgcattcaattaggcagcgagcaggcctgcaagacagtagattcaaatgattgtctagtcactacatctacaaaaatatgtttaattgggacaatttcaaaattccaaccatctgacacacttctttttcttggccctcttgagcagggtggtctaatttttaaacaatggtgtactgcaacttgtcaatttggtgatccaggtgatataatgagcacatcacaaggcatgaagtgccctgacctaaatggatctttccgaaaaaaatgttcatttgctactacccctgtgtgtgaatatgatggcaataccatctctggttataaaagaatggttgccaccaaggattcattccagtcatttaatgttagtgaaccacatattacagctaattcattagaatgggttgatcctgatagctcactaaaggaccatattaatgttgtggtaaatagagacatttcatttcaagatttgagtgaaaatccatgtcaagtggatgttagcacttcatcaattgatggggcatggggttctggagtaggttttaatcttgtttgtcaggtgagccttactgagtgtgcaacgttcttgacagcaataaaggcatgtgattcagcaatgtgttatggatcaacaacagcaaaccttgtgagaggacaaaatacaatacatgtagtgggcaagggtggtcattcaggctccaaatttgtatgttgccataatactaagtgctctagcctgggtcttgtagcggctgcaccgcatttggacagagtgacaggttataatcagatagataataataaagtttatgatgatggtgcaccagaatgcggagtaacatgctggtttaaaaaatcaggtgaatggatagttggaatattaaatgggaattggatggtaattgcagttctagtggtgttgttgatcttatcaatttttctttttgcactatgttgtccacgccgtccaagctacaagaaagagcacaaaacataa

SEQ ID NO: 14979 - DNA, 6456 bp, unidentified
  source 1..6456: mol_type = other DNA
  misc_feature 1..6456: note = Synthetic
atggagaaatatagagaaatacacagggatctgaaggagtttactattaactcattaacagccgtggaatgcatggattacttggataggctctatgctgtccggcatgacattgttgaccagatgataaaacatgaatggtcagacaataaagacagcgaggagccaataagtaaggtattgctgtttgctgggatacctaataatgtcataacagcattggaaaaaaaggttatccctgatcatccaagtggtaaaacactgcggtctttttttaagatgacacctgacaactatcgaataacaggttccttaatcgagtttgtggaggtaactgtgactgcagatgtagataagggtatcagagagaagaaaatgaaatatgagctaggtctgaaatatctagagcaagaactcatgacattttttcataggggagaactacaaaacccttataaaattacatttaaagtagttgcagtccggacagatggatcaaatatttcaacacaatggcccagtgcaaggaatgatggtgtcgttcaatacatgagattggtacaggcagaaatcagttatgtaagggaacatttggttaaaactgaagaaagagctgcattagaagcaatgtttaacttgaaattcaacataagttctctaaagacacagccttattttatccctgaatataaagggattgatctgattagacctgatatagatgggttagtgaactatgcccaaagctggatgtcaaagacccaagaattctctttctttgaagtaaaaggttcagctgtgtttgattgttttaatgagaatgaacaagggcacattgtaaaatacccaatgtcccggcacccgaggaactttttactcatccaatgcactgtattaacagcatacaaacctgcaactatactttctgatcagcttgatagccgtagggcctgcattcaatttttaaacctcatcccagaaacccctgcatctattcttgcacatgatatggcacacagatacatcaatttgactagagatgatttattagcatattatgcacctagaatccaatttaacccaacccaaaatattaaagaaccaggcacctttaaattaacatcaaatatgatgaggcctgagtcaaagattatgctggatatgctaagtcaacatgaacctcgagaaaatctggggaagtcaatagaaagtttaaacatcagtagtcatattgtacagtcagattgtgttagcctaatcacaaaaattttgtcagatttagagcttaatatttctgaacctagtagccatgagcagattacagctaaacacacacatgttgatactgtattggataaattttttcaaaacgagactcagaagtatctaattgatattctaaagaagaccacagcatggcatatcgggcatttagttagggatattactgagagcttgattgcacattctggattgaggaggtctaaatattggtcaatccatgcttataataatggaagtgtaatattgttcatactcccttcaaaatctcttgaggttgcaggttcgtttgtgcgatttatgactgcttttaaattaggtcctgggctagttgataaagacaatttggattcaatacttgcagatggtgatatcttatggggagtctcaaaaattatgagtctagatctgaacaggttacttgctttgaatatagcttttgagaaagcactacttgcaacagctacatggttccaatattacactgaggatcagtcacaatttccattgcaacattctatccggtcagtatttgcttatcattttttgcttgctatttgccaaaagatgaaattatgtgcaatctttgacaacctaaggtatctgatacctgctgtgacatctttgtattctggctttccttctttggttgaaaaactgtttgagagaccttttaaaagtgctttagaagtctatgtgtattataacatcaaaagtctgcttgtcgcactggctcaaaataataaggctagattttattcgaaagttaaacttctcggattgactgttgaccaatctacagttggtgcaagcggtatctatccatcctttatgtcacgagttgtttataaacattataagagtttaatttcagaagtgacaacttgcttttttctttttgaaaagggtttgcatgggaatgtgaatgaagaggctaaaatacatctggaaactgtggaatgggcaacaaagttcaaagaaaaggaggataagtatggtgagatgttagttgaacatggttatacaataggagagcttgtagaatccagtgaactagcagtccaacaactatattgtcaagatgcagttgagctggctgccaatgaattgaaccgagttcttatcgcaaagtctcaggtggttgctaatagtatcttaaataagtattgggaagagccatattttagccaaacaaggaatattagtttaaaaggcatgtcaggccaagtacaagaggatggacatttgtcgtcatccactacaataattgaagctataagatatctgtctaattcaaggaacaatcctaacgttcttcaactatatgaagaaactagacatcagaaggcacaagctagaattgtgaggaagtttcagaggacagaagctgatcgaggttttttcattacgacactaccaacaagatgtcgtcttgagattattgaggactattatgatgcaatatcaaaaaacgtagcagaggaatatatctcatatggtggagaaaggaaaattctctgtatccaggcggcccttgaaaaagctctccgctgggcatctggagagagctttattgagctcagcaacgggaaatttataaggatgaagagaaaacttatgtatgtcagtgctgatgccactaaatggtctccaggtgataattcagcaaaattcaggcgattcactgctgcccttcataatggactgcctgatgacaggttgaaaaactgtgtcattgatgccttgcgccatgtatataagactgacttttatatgtctagaaaacttagacactatattgattctatggatacttatgaacctcatgtcagagactttttaaatttctttccagacgggcatcatggagaggtacgaggcaattggttgcagggtaacttgaacaagtgttcatcattgtttggtgtggcaatgtccttattatttaaagaaatttggacaaggttatttccagaattagactgcttttttgaatttgctcatcattcagatgatgcacttttcatatatggctacttagaaccagctgatgacgggactgattggttcttatttgtatcccagcagattcaagccggaaaattgcattggtttaatgtaaatacagagatgtggaaaagtatgtttaatctgcatgaacacattcttctgttaggatcaattaaaatatccccaaagaagacaacattatcgccgacaaatgctgagtttttgtctacattttttgagggttgtgctgtatcaattccctttattaaaatccttcttggctcactatctgacctaccaggtcttggctatttcgatgatcttgctgctgcccagacgaggtgcgtcaaagcaatggatttaggagcatcacctcaaatctcacaacttgcagtctcacttagtacgagtaaggttgagagattatatgggacatcaataggcatggttaattatcctggcacatatttaaggacaaaacactctgaaactccaattccactgggaggaagtggtgcaatgtcaataatggaactttcaacagccggtataggtatgtctgacaaaaatttactgaaacaagcacttattggttatatgcataaacaccaaaagcaaatgagttacatcttggggctcttcaagtttttaatggatctctctggtgagacatttcagcatgaaaggctaggccagttttcatttataggaaaagttcaatggaagatattcacacccaaatcagagtttgaattctctgacatgtattctcagaagtttttaaaggtttggagtgaacagcatcctacatatgattacattattcctaaaggtcgtgataatcttcttatttatcttgtgagaaaattgaatgacccaagcattataacagctatgactatgcaatcacctttacaactcagatttaggatgcaagcaaaacaacatatgaaggtttgcagactagatggggactgggtaacatttagagaggtacttgcagcagcaaacagttttgctgagagctatgaacctagtcaaaatgatattgatttatttcaaacattgactagctgcacattttctaaagagtatgcatggaaagattttttgaataatgtacactgtgatgtgataccaacaaagcaagtacaacgtgcaaaagttgcacgtacattcacagtgagagaaaaggaccgaattattcaaaacagcattccagctgttattggttacaagtttgcagtaacagttgatgaaatgtctgatgtgctagacacagcaaagttcccagattctctggcagttgacctaaagacaatgaaagatggagtctatagggaattgggtttagatatctcttccccagatgttatgaagaaagtggcacctatgttgtataagagtgcaaaatcacgggttgtcattgtccaggggaatgtggaaggaactgcagaggcaatctgtgcatactggttaaggaatatgtcattgattaagacaattaaagttaaaccccataaagaagtgctccaggctgtatccatatttaatagaaaagaagatatcggtcaacagaaggatttgtcagcactaaagttatgtattgaagtttggaggtgggcaaaagcaaataatgcaccatatagggactggttccatgcattatggtttgaagacaaaacattttcagagtggctagatagatttatcagagtaggtgtgcctcctattgatccagaaattcagtgtgcagcattgatgattgcagatgtcaaaggtgacaggtcagtgttacaactccaagccaatagaagagcatattcagggaaacaatatgatgcatattgtgtacagacttataatgaagagacaaagctttatgaaggggatctaagagtaaccttcaattttggattagattgtgcacggcttgagatattttgggataaaaaaacttatattcttgagacatccatcacacagaaacatgttttaaaaatcatgatggaggaggtttcgaaagagctagttaggtgtgggatgcgatttaatactgagcaagttaatggtgtaaagcaccttgtgttgttcaagacggattcaggttttgaatggggtaagcctaatattccatgtattgtatacaaaaactgtgcattgaggacaggcttgaggacaaaccaggctatcaaccataagtttatgatcacaattaaggatgatggtctcagggcaattgcacagtatgatgaagatagcccacggtttcttttagcacatgctttccatactatccgtgatgttcgctatcaagcagttgatgcagtaagtaatgtgtggttcacacataaggggataaagctatacttgaacccgatcatttcatcaggactgctagagtactttatgaaaaatatacctgctgctattccaccagctgcttattcattaataatgaatcgtgcaaaaatttctgtggacctttttatgtttaatgacttacttagactaataaacccaggtaacacacttgacttgtctggtcttgaaataacaggtgagggttatagtacagtaaatagtctttctagtagattatggtcagaagaaatgagccttgttgatgatgaagaggagatggatgatgagttcacaatagacctacaggatgtagattttgaaaatattgatatagaagctgatgtagagcatttcttacaggatgagagtgcttatacaggtgatctattgattatgtcagaagaaacagaagtaaaaaagatgagagggataattaagcttttagaacctgtaaagttaataaagagctgggtttcaaggggattgtctattgaaaaggtatacaacccagttaacatcatactaatgactaggtatatatcaaaaaactttaacttttcaggcaagcaggtatccttattagacccatatgatttaactgagcttgagagtattgttaagggatggggtgagtctgttgtggatcagtttgattcccttgacttagaagcccagaatctagttcaaaagcagggtattgtacctgaggatgtgattccagactcgttgttttcctttagacatactatggtcctattacgccggctgtttggacaggattcagtttctacattctattaa

SEQ ID NO: 14980 - DNA, 6462 bp, unidentified
  source 1..6462: mol_type = other DNA
  misc_feature 1..6462: note = Synthetic
atggagaaatatcgggagatacatcataaggtgaaggcacatgcagtaggtagtctgactgcagtggagtgtattgactacctggacagactttatgcaatcaggcatgacttggtggatcaaatgataaaacatgattggtctgacaataaggacagagaagaacctattgccaaggtgttgttaatggctgggatcccagagggagtgatcacagggttagagaaaaaggtaatccctgatcatcctacaggcaagacactgaaggcattctttaaaatgacaccagacaattacaagattcaagggaacaagcttgaatttattgaagtaacagttactgcagatgttgataggggtatactggagaagaagcagaagtatgaggcaggatttgcctttttggagaaggaattacagcaatgttaccagagaggggagctgagacaagttataaagatagaattcaatgtcgtggcagttaagactgatggatccaatatttcttcacagtgggctagccgtagatgtgatggagttgtacagtatatgaggatggttcaggcagaaattaattatgtaagggagcacttagtacggcctgaggaaagggctgctatggaagcaatgttcaatctgaaattccatattggtggattaaagactcaagcatactatgttcctgattttccaggtattgacagtatgggaccagatctctccaagctggtgaaatactgcggagaatggcttgcatgtgatcataaactggtttttcatgaagtaactggtaagaaggtgtttaatgtatttggtgagatggagcaattgtgtttatctcggtataataggtccagacaccctagaaattttctacttattcagtgttcactgagatcagcctatacaccttcaactattgcatcagatcggatagatactaagtttgcatgtactgaacttttagcttgtgaaccgactacaccaactgcagcaattgttctcgatatggcatataggtttatgaaccttgaaaaagaggacatgatgagttattattctagcaaagcaacttttgaaccgacaagagctgttaagactccaggtacatttaagttaccatcatcacaaatgcgacttgaggcaaaggcctttttggacagtttaagccaccatgagaaagagagcaaacatcaggccaagcttgagagcttggacataagttgtagggctacccaagacgagtgcactgcagtgatcacaaagattttatcagatttggaaatgaacattactgatcctagtcggttagagagagttactgtcaagcatacttatgttgataaggtattagagaaattttttcagaatgagttacagaaatactttatagacattataagaaaaacacagtgttggcatataggtcacttggttagggatatcacagagagtctcatagctcatgctggtttgaagagatctaaatattggtcactccatgggtatgatcatggtaatgtgttattgtgtatattaccatcaaagtctttggaggtatctgggtcatttattcgttatgttactgcatttaagttgggccctggattggtagatttagagaatttggatacagtattagaaaatgaaggtactgtatgggcaatttccaaggttatgagcattgatctaaacaggctcttagcactgaatatagcatttgagaaggcattaattgcaactgcaacatggttccaatattacacagaggatcaaggtcaatttccactacaacatgcccttagatctgtttttgcttatcactttttgctatctgtctgtcagaaaatgaagatatgtgcaatttttgataatcttagatatttgatcccagctgttacatctttatattcaggttatccgtccttaattgaaaagttattagaacgtcctttcaagtcttctcttgaggtatatatttatacttgtataaaagggttgcttgttgcactggcacaaaataataaggctcgattttattcaaaagtaagattattagggttgactgttgaccagtctacggtgggggctagtggggtttatccatctttcttgtcaagagtcatatataggcattacaggagtcttatatctgaggtaacaacttgcttcttcttattcgagaaagggttgcatggtaatatgaatgaagaggcaaagattcatatggagacagttgagtgggccagaaagtttgaagaaaaggagcagttgtatgggaaggatcttgttgaacatggttactatttagatgagttaaagaagaaaccagagttggcagaccagcagctttattgccaagatgttattgagctaagtgcatatgagctaaataagttgctgatctcaaaatcacaaatcgtagccaacactatactgtcaaagcattgggattacccatattttagtcagactaggaatattagtctaaagggtatgtcaggagtagtccaggaagatggtcatttgacatcgtctgtgacaataattgaggcaataaggtatctgaatcaatcaaagaataaccctaccctcttacagctgtatgaggaaacaaggcatcagaaggcacaggctaggattgtccggaaataccagagaacagaagcagaccggggatttttcataacaacattagctactagatgtcgcttagagattattgaagattattatgatgccatagcaaagaatgtgccagaagaatatatatcatatggtggggagaagaagattctgaacatacaaatggcccttgagaaggcactgcggtgggcatctggagagagctttatagagttatcgaatggacatgtcattcacatgaaacggaagttaatgtatgttagcgcagatgcaacaaagtggtctccaggtgataactctgcaaagtttaggcgattcactgcgtgtttacatgatgggttgaaagatgctaaattgaaacattgtgttattgatgcactgcggaaagtctaccacacagatttttttatgtcacggaagttgaaaaaatatgtatcacatatgaccacacatgatagcaatgtagcagaattcttaagctttttcaagaatggctatagcggtgaggtaagaggaaattggttacagggcaatttaaataagtgttcttctttatttgcagtggccatctctttattgtttaaagagatatggaaacagcttttcccagatctggattgcttttttgaatttgcacatcattctgatgatgctctattcatttatggttatttagaacctaaagatgatggaacggattggtttttatatgttactcagcagatccaggctggtaatttatactggcatgcagtaaattctgagatgtggaagagtatgttcaatcttcatgaacatcttatgatattgggatctattaagatatcacccaaaaagactacagtctctccaacaaatgcagaatttttgtcaacattttttgagggttgtgctgtgtcaataccattcatcaaaattctactaggttcgttgtcagacctgccaggtctaggattttttgatgaccttgcagcagcccagagtagatgtgtcaaagcacttgacatgggtgcaagcccccaggttgcacaactggcagtaacactgtgtacaaataaggttgagagactgtatggcacagcagttgggatggtaaatcatccgtctgcctatctggcagtggattactcagatgttcctatagcacttggtggaaatggtgccatgtcaattatggaattggcaacagctgggattgggatgtctgacaagaacttgcttaaaagggcattggttggttataatcacaagagaaggaatcaggatatttatacattgggtttgttcaagtttttaatgagtctgaatgatgaaacattcacacatgaaagattaggtgagttttccttcatgggtaaagtgcaatggaagatttttactccgaagagtgaatttgagttttcagacctttatacacagaatttcttgcatatatggacagaacaacatcccacatatgattatatcatacctcgatcccgagataatctcttggtatatctggtgcggaagttaaatgatcctagtataatgactgcaatgacaatgcagtcacctctgcagctcagatttcggatgcaggctaagcaacacatgaaggtttgtcgttatgcaggggattgggttacatttagagaagtgttggctgcagcagatagttatgcctctaattatacaccgactcaagaagatttggacttgtttcagacactggtagcctgcacattctctaaggagtatgcctggaaagattttttaaacaatgttgagtgtgatgttattccaactagacaaatacaacgctcaaaagtggcacggacttttacagtgagggaaaaggatcaagtgatacaaaatcaaatttcagtagtgattgcctacaagtttgcagtcaccgttgatgaagtctctgatgtgttaaaggcagcaagatttcctgattcattggcatccgacctgaaaacattgagggaaggtgtttacagggaattgggtctagatgtggcacagcaatcggtgatgaagcgtatagctcccatgctttataaagcagctaggtctaggatagtaatagtccaaggaaatgttgagggtactgcagaagcaatatgcgcatactggttgagaagtatgtccctaataaaaaccattaggataacaccgcaaaaagaagtgttgagggcagtgtccatattcaacaggaaagaagatataggacatcagaaagatctagctgcattgaggctatgtatagaaatatggagatgggcaaaatccaatcaagcaccatataaagactggtttaactcattgtggtttgatgacaaaacattggatgagtggctagctagatttgtaagagtgggcccacctctgattgatccagaaattcaatgtgcagctcttatggtagcagatatcaggggtgacatgtccttacttcagattcaagcaaataggcgagcatactctgggaaacaatatgatgcttattgtatacagacttataatgaagagactaagttgtatgagggagacctgagggtcacatttaattttgggttggattgtgctaggttagagatattctgggagagtcaaacgtatatcttggagacatctattacccaaaaacatgttctcaaaataatgatggaagaagttactaaggagcttctaagatgtgggatgaggtttaaaacagatcaggtgtcttctgcacgtagtttggtactgttcaagacagaatcaggatttgagtggggtagaccaaatataccttgtgtagtatataagcattgtgcacttaggatggggttgagaatgaatcatgcagtatcacatgagttcataattagcattcgggatgagggtctaaaggctattgcacaggcagatgaagatagccccaggtttctcttggcacatgcatatcatagtcttagggatataaggtaccaggccttggatgcagtgagtaatgtctggttcactcataaagggattaagttatacctcaacccgataattaactccggtttatttgaaaacttcatgaagagcctaccagctgcaataccaccggcagcattctctttaattatgaataaagcaaagatatcagtagatttatttatgttcaatgatttgttaaaaaggataaatccaagtaatgtccttgatttgagcgggttgactttgattgacccaggtgtcagttcagttagtggtatgtcatcaaggaactggtcagaggaggttagtttgactatggatgatgaggacgatactgatgacgaagagtatacaattgaattagatgagattgatttcgataatatagacttggatgctgatataagccattttttacaggatgagagtgcatatactggtgatttgttaattagtagtgaagaggcagagataaagaagatgagaggtatcacgagagtccttgaacctattaaacttattaaaagctgggttactagggggttggcagtggaacgtgtatataatccagtaggtataatcttaatgacacgctatttgtccaagaactttacattcaataagcagcctgtgtctttattagacccctatgatctgactgagttggaaggtattgttaagggctggggggagttagtgttagataggtttgatgagatcgataaagaagctcaggacctggttgtgtccaagggtattgcccctgaagatgtgttgcctgattctctattttcttttcggcatagtttaatattgcttcgccgtttgttccctcaggatacactatctaccttttattaa

SEQ ID NO: 14981 - DNA, 33 bp, unidentified; identical to SEQ ID NO: 7823
  misc_feature 1..33: note = Synthetic
  source 1..33: mol_type = other DNA

SEQ ID NO: 14982 - DNA, 21 bp, unidentified
  source 1..21: mol_type = other DNA
  misc_feature 1..21: note = Synthetic
atgcatagatctactggatag

SEQ ID NO: 14983 - DNA, 273 bp, unidentified; identical to SEQ ID NO: 12999
  misc_feature 1..273: note = Synthetic
  source 1..273: mol_type = other DNA

SEQ ID NO: 14984 - DNA, 273 bp, unidentified; identical to SEQ ID NO: 12999
  misc_feature 1..273: note = Synthetic
  source 1..273: mol_type = other DNA

SEQ ID NO: 14985 - DNA, 27 bp, unidentified
  source 1..27: mol_type = other DNA
  misc_feature 1..27: note = Synthetic
atgataatatcaaaacgatggatataa

SEQ ID NO: 14986 - DNA, 45 bp, unidentified; identical to SEQ ID NO: 7830
  misc_feature 1..45: note = Synthetic
  source 1..45: mol_type = other DNA

SEQ ID NO: 14987 - DNA, 1329 bp, unidentified; identical to SEQ ID NO: 14033
  source 1..1329: mol_type = other DNA
  misc_feature 1..1329: note = Synthetic

SEQ ID NO: 14988 - DNA, 57 bp, unidentified; identical to SEQ ID NO: 7832
  misc_feature 1..57: note = Synthetic
  source 1..57: mol_type = other DNA

SEQ ID NO: 14989 - DNA, 42 bp, unidentified; identical to SEQ ID NO: 7833
  source 1..42: mol_type = other DNA
  misc_feature 1..42: note = Synthetic

SEQ ID NO: 14990 - DNA, 57 bp, unidentified; identical to SEQ ID NO: 7834
  misc_feature 1..57: note = Synthetic
  source 1..57: mol_type = other DNA

SEQ ID NO: 14991 - DNA, 48 bp, unidentified; identical to SEQ ID NO: 7835
  source 1..48: mol_type = other DNA
  misc_feature 1..48: note = Synthetic

SEQ ID NO: 14992 - DNA, 42 bp, unidentified; identical to SEQ ID NO: 7836
  misc_feature 1..42: note = Synthetic
  source 1..42: mol_type = other DNA

SEQ ID NO: 14993 - DNA, 255 bp, unidentified
  misc_feature 1..255: note = Synthetic
  source 1..255: mol_type = other DNA
ttgcccggcaaaaacttaaagatgcagaaaagacggtggaagccgacccggatgatgttaacaagagcacactacagagtagacgggcagctgtgtcagcattggaggacaaactggcagacttcaagaggcagcttgcagatctggtgtcaagtcaaaaaatgggtgaaaagcctgttgacccgactgggcttgagccggatgatcacctcaaggagagatcaagccttcgatatggaaatgtccttgatgtga

SEQ ID NO: 14994 - DNA, 255 bp, unidentified; identical to SEQ ID NO: 14993
  misc_feature 1..255: note = Synthetic
  source 1..255: mol_type = other DNA

SEQ ID NO: 14995 - DNA, 1302 bp, unidentified
  source 1..1302: mol_type = other DNA
  misc_feature 1..1302: note = Synthetic
atgagcaacctcaaagatattcaggatgagatcactcgttacgagcagcagctcatcgttgctcgacagaaactcagggatgctgagaaggcggtggaggaggaccccgatgatgttaacaaaaatacattacaggcaagacggcagactgtgtcagcactggaggacaaacttgcagacttcaagaggcagctcgcggatcatgtttctcgtcagaagatggatgagaggccttctgatccgactgggattgagccagatgatcatctcaaggagagatcaagcctcaggtatggaaatgtccttgatgtgaacgccatcgatattgaagagccaagtggacaaacagcagactggtttacaataggtgtctatattattagcttcacactgcctattatcttgaaagtactgtatatgttgtcaacgaggggtcgccagactgttaaagaaaacaaaggaacaaggatccgctttaaggatgatagttcctttgatgatgtgaatggaatccgtcgtccaaagcatctctatgtgtccatgccaactgcacaatctaccatgaaggcagaagagctaacaccaggccgtttcagaacgattgtgtgtggtctttttccagcacagatacaggcaagaaacatcatgagccctgtaatgggagtgattgggttctctttctttgtaaaggattggccagaaagggtaaggaggtttcttgataatagctgtccatttattaagccagaagtaaaaccagggactccagccggggaagttgagtttttaagtagaaaccaaatttactttatgaggagacaggaagttctagaagagaaccatattcctgatattgataaacttctagagtatgcagcctctggagatccaactgcaccagattctatagagtcaccatatgctccatgggtgtttgcctgtgcacctgaccgttgccccccaacatgcatatatatagctgggatggcagagttgggtgctttcttctcaatcttacaggatatgaggaacaccatcatggcctccaaaacagccgggacagcagaagagaaactgaagaaaaagtcatcattctaccaatcttatctgaggagaacacaatcaatggggatacaactggatcaaaggattactttattatatatgatagaatggggtaaggaaatggtggatcatttccatcttggtgatgacatggacccagatctcagggccttggctcagtccctgattgatcagaaggttaaagaaatttccaaccaagagccactcaaaatataa

SEQ ID NO: 14996 - DNA, 297 bp, unidentified
  misc_feature 1..297: note = Synthetic
  source 1..297: mol_type = other DNA
atattcaggatgagatcactcgttacgagcagcagctcatcgttgctcgacagaaactcagggatgctgagaaggcggtggaggaggaccccgatgatgttaacaaaaatacattacaggcaagacggcagactgtgtcagcactggaggacaaacttgcagacttcaagaggcagctcgcggatcatgtttctcgtcagaagatggatgagaggccttctgatccgactgggattgagccagatgatcatctcaaggagagatcaagcctcaggtatggaaatgtccttgatgtga

SEQ ID NO: 14997 - DNA, 21 bp, unidentified
  source 1..21: mol_type = other DNA
  misc_feature 1..21: note = Synthetic
atagaggttataagagtgtaa

SEQ ID NO: 14998 - DNA, 10080 bp, unidentified
  source 1..10080: mol_type = other DNA
  misc_feature 1..10080: note = Synthetic
atgaagaagaaggagtctggagtggtggagagaggacgtggaacgcgtcctcctgccaatcgtggaggaggagctcctccgaagaaggagagagatcgaggaggccaaaaggtctcgctccctgggacttcaagctccatcggatcggaccgtggcaaacgggtcaagggactcggcggacgaaagggactgctcggcaagctggggctgggatgggggtcttttttacagaaagacatcatccaagccatcatgcacctggtcctagtcctacacgccctgttcatgtccattgaccaacgctttaaggcgctcacccggcgggtgcgcgccctcgagaatcgacgatctgccaatcccctactgctcgccactatcatctgcgcggtcgccaccttgtgtggcaccatggtgatcgacatgcaagtgtcctccgctaaaggcgtgcaaatttacgaagggaaaacaaaccggactgactacttgcacttgttcaagcttccaaaagatggatgttggaacggagtgctggtttccaaacactgtcctaaggtcggcgacttggccaaggacttggaggccactgactgcggatctacatggagcgaattcacactgcgatataatcgatgtgtgggaaagaagcgcgtcaagcgggctaccgaacaaccgaaagcggacctacttgcggagatggagatggtaacgttcaagaccatccgtcaaaacaagacgattttcattatcgctctgctctgtgttgccgttgcaaagagatggcctacttgggtcgtcattgttcttgcaattggcacatggtctaccgtcaaaggagaatttgtggaaccattgtacacgctgaaagcggagcgaatgaccatgatgcaaacgatcgttcgtccggaagaggggtacgttatcgctaccccaaacggacttgttgaactgcggactagtgctgccaccatcttgggaggccaatggcttcgtgagcttctagttgactgccaggtcaatgccacctactcaacggatgtgtgtcctggaggttctcagcttaatatggcagagatatcatccaaggagcgggtttgcactacgcaaccgtacaaccgcgggtgggggaccggatgcttcaagtggggaattggttttgttggtacatgcgttgaactccattgtgaagaagggtacaacgtgtcgtccattgcacgatccgccatcatcatgaacatcacggcgagtttccactctgtcagtgacacccagcagttgctaggtgacataccagtcaccttccgatttgctaagctcggaaacgcggctatgacttgtcgcttggaatcagagcaactcctgcttgattattaccacgttaccggcaacaaacgcgaaggactattcctgcggtcccaggtggacaattggcctggagtcatatcgtcttctgggggacgagctggattagagaaggtcgttgtttggggagacacgaaagccaatgagatattggttaaacacgtcatggaaccccagcttgagtgggataatgccattcctacacatgcgggcttccgtgacgttgctttcgtgtgtcaaataatgctggataaactggtcagcggagcgttccgcgattgccaaggattaaaatcatcggtgtttgttcagagtggctttggatacagtggggttgttatcaccacgctgttgcaaccaacgaacgagagctgctcactcaacatggtgtgtcatggatgtcagttgctatcgacgaaaatggtgtttggggctggaaaaccaacgtcccgtgccttcgtcggctgtgggaaccacactggttcactcttgattggcggtgcatctgtccccattgaatgtgtgatgaaccccatctctcaaggatggaggctaacccgacacgttgtggacaagtaccgacgattcggagtaccaggagttgcaggagtttggcgcgatttcgttggaggcttctccctcgggaacctgataaccaactcgacgttgctcgtcctcctagcagcgctggcattcctcgacaagcgtgttgtggtgctcctgctagtctgtggatacttctactacacacgtgctgatgtgggttgtggatttgatcccgacaggaagatcatgtcgtgcggtactggtggcttcgtgtggaagagcatttcccaatggcctgtgaacgatcactctgtccagcttgaagacgacgctgttgtggtgtcacttgtaacggaacaactgaagaccacaaacaaggtttgccttatgtgtgaggatgtcctacaatgtgcggctgcccgaagtgttgtcaagagaatcactcacgtcaacaacgagcttgtctatgcgaacacaaccctgtcttacgggagggtttttcctcgagtgaagaaaagtgtccatggtgtgaagattggggacataacgatgcagctcgccttggctacccttgacggcacgctggacgacgccgaattgggacacctgacaagtggattcttttcacgaggaaaacaaaacgagactgttgaccacaaggttgtccgcgtcatcacgagtggcagtgagtataagaaggtttgttctcaggcattcgcattgcagtatggctttgtgcgattttcgcgcaaggtgtacggatcaaacgtggtcgtgaaaccggttgagaaaccgagtgaagcgtgcccgacgtacctggccggttcatatgttaagaacgatgtcggagggtacactgatggcatgatgtggatgcgtagccgtaaggtgaatggctcatgggagatgttcgagcttgagacgacccaaagccaccaatgcatttggccacaggagtacacatttgatctcacgactcacaacgatagtacattgtttatgccagcccattacggagcgccgatgtccaaagccaaccacatccctgggtacggaactcaacacgagttcccgtggtacaaggccgagataaaattgcggcagggaccagttcctggaactgaagtggagtccatggactcgtgcgatggtagtggatcagcggtcaaagtggaccctgccattgcaaagaagtggtgctgcaaaggatgtttggccaatgatcgcaagcccattcacttcatcgtggatggtgacttcttttacccaatggaaatacgaccaatgactgcgcattcaaagctcatcatcgagaacgagggtgttgaaatagacgagatggatcagatgttcccaaaaaccgtctctccaatccctggagctgaagctttgcttcaggatttccgggacagcctgccagtagatggatcttctcctttactggtgggcgtgcttctacacctgctaacaattcggactcgacaccgatggggccaacgcacaatcggtacctggctgctattcgtagtttttggtatacctgctggaagctgggtcggttggtcgtggatgggcttgtcttactcgctcgccgctgtgcccaatggaagcgcacttcttgtgcatttttggcttgctttgcagttctcaacatcacatttgtttttcctaggttggttgttgcgcaaacgcgtcgagtcatctatcgaatacgcattaaccgtgttcgccgccgaatgggtaattttgaaattacaaatgttgatcaaacaagcatcccacctcgagcacgtcctgttccctctgtacgtgaagttggcactcagtatgagatcccagtttgcccctgtggacagcatgattgccctgaattacgtggtgacgcacccgttgatggcggccctggtgagcctcggtgttgccctggtgatctttgttacacacgtctgcgcgaattggaggcggtctccaaacttgtggaagagtggacttcgggcttcgaagcgatcagctctattgggcgtgtactttgtagtgttgtacgtggtttcagtcttactgcgattcacgggtctggagagctctgccgtcgctgtgttcctggggggtctgctgatcggactagtgaccaggctggttcctccgacgaaatatgtacttgtcccggtgccgggtacgagcgtgccgagcaactgcgaagaatcattcacaagactaccgccaggattagaaggtgtctacggacccagtggagtggaattcctgaactacactgatgtgggattggtttccgttgcaatcctgatgttcacgggctgcctcggtgtgacgctcatgaacccattgttgggtatcacgtccatgctcttctgctggtttactgaagcatacgtgtggttgccgaggttgatcttcggcacgagcaatcgccgctctggggtgaacgacgttctgctagcccctcctgtctacgcggacgagattgatgttgaaagcgactttggacacataccggatggaacttacaggatagtggcccattgcacctttttcaagtatcacacaggagccggctatgccaaaggtggtgttttccacacactatggcatgtcacatcaggagcttgtgtctactgggagggcagagcggttcgtatgcactcggctgacatctaccgcgacatggcgtcgtatggtggcccatggaacatcaccgagtcaaacgaggcatctgttattgtccgcgtggtcgaaagcgacaacagcgtatcctgcgtgcggtgttccacggcccaactaaaaatcaatggtgaaactgtgtcggtgattggaaaggactttggacgcggctcatctggatcccccatccattctttggatggcagggttgtcggcttgtatggctatggcttccacattggatgggaatacttttctatcatcacaagtggagaagttgccatggccgcagaaatagccgaggaggccggttcgtcacgaagctttgtggactggcaccctggaagaggaaagacgcgcaaggtcttggttgccgaagcacaggaacacatcaaacaaacaaagagattgctcatcctaacaccaacacgagttgtcaaagatgaagtcatccgagcgattggtgaagcttgtccaggcgtggtcattggctcaaatctagccatgtaccggcgaaacgcagtcacggtagcatgccacgccacgctaacgcagtatgtcatggagaaaggcattgacagcatcaaattttcaaagatcataatggatgaatgccactttcttgatccgctgtcgattgcttgtcgtggaatcatggattaccataacgcgaagggagtcaacgtcacttacatgagcgcgactccccccggttatcctggaagcaacggctcaaatttcaacatccaggacgtcgccatgaaattccccagggacataactgcggcatggatccgcaagaacgcggagggcaagacaatcgtgtttgttgccacacaacaccaggccacgtctctagcgagagatttgaaaggcgttgccttaacgcgagaaactttcgactcagccatcgccaaagcgcgaaacccggaaactgaatttgtggtatccacggatattagcgaaatgggagccaatctcggagtgaaaacagtcattgacacgcgcatagcggttaaacctgtgatgtcagaaggcggggtgatgttggagaaagtcggcatcacagaagcctcggcaatccagcggcgtggaagaactggacggcgtgaagaagggcagtacatataccccatcggggttgagcttgaacatgagcccgcgaactgggcttgctggactgaggctcagatggtgcttgaccaaatgatgtgtgggccaatgcgagaagaagcagagtactttcagccacttggacactaccttcttgaagaaaagggaagaacacggtttgtggagcttgtgaagaaagagattcccatctggctcgcgtggcaatgggctaaagcttttgatcatcgtcacaccattttgttcaacgggccacagcgaacgaagctcaagatccggactgaagcaggggatcacgcgtacgcccccaggttccacgacgaccggtttgagaaatgcaacgaactggaaaagcgcacgaaattgtcaatctttctcaaacaacggagcgtcctcaattttgatgtcctcggtgtggctcatggcctgtatgtcgcgttgacctcaatcaacatggaaatgctcggtaacacgtttcgcgacacaatcgaaaacctgcatgtcatatcaaatgtggacgacccttacgtctctgatttcacgatggggcaatctctgaatgcttggacagcagtcctcatcggggccgccgccagtacgatcctgctgttgacagttgttggcatgtacaagatagtgtgctggctgtttggacgacgacctgaccaaccaagtagcgccccgccgacgataatcacgtatgcacaaggtggaatttcacaacttgggtcaatggctatcgccatagctcccatgtgcgcggtcctggtcggcatccccccggttttcgtcttcatcgcggtggtcggactgttcgtgatcatgagcgttaatgcgaccaatgttcatagagcttacacaggcgacacgattaccatcatcatcatcatggtttgcttggccgtcatgggcattgtcgcttgggaattggaactaatgccaaacacacgccgagatctgacccgcctaacccactatctgatggaacggagacctgcggcgacaggcggtgttcctcgcgcaccagcggctcccacactaccgttcagcatcaccagtttacctggtgcgttgtgtgtaagttacgcaattgctggaattggtggcgtgtttgccaactgctggtccgatggccacttcctgcgaggactgtttgccaatgaagctcaatcggcgtccgtgattggaggagttcaagtgtcggctattgcttgggagataatgattcccgtggctttttcagctttcttcgccacgacgttcgttacaaagatctacggcatcctgatcggggctatcttcttgatcttggcgcactttgatcggaagcatgctttttcaaatcgtgcagtgaaggtacttgtggcccgaactagcaagaaggacgttgacgacgacatttccggacgagatggtttgtcccatgctagaccgacgttcttcatgactcaggtgctctcttcagcgctctgggcgataactgctccctcgagcctgcacatcatggtgtttttcgccatctgctgcttcacgttcctgacgttccgaagaccaaacaactatctactgggcttgctagactatactggtttgttgctcgttctgatgatcgtggttgatccagtgctactgatgttcgtcggtgctgccttggtgttctggttcatcgtacatccaaaccgtctggcaacccgctcgctggtgaagactgacacttgcggaatcgggtaccggtggaaagagatattgaattctcttgacaagaacgcgtttgatcagtacaggtcccgaggtgtcaatgaaacggataagggagactatgtttctcgaggtggcctgaagatggacgagttgctgaggaaatatcagtgggaaccgaaaggtgttgctgttgatctcggatgcggaaggggaggttggagtcagcgtctggtgatggactcacggattagcgctgtccacggattcacccttggaggtaacaaccgagagaacccccagccgttccggacaaaagggcataacctagccacattgaaagctggcgtcgacgtgtatgccgagccgccaaaagattgcaacacgatcgtctgcgacattggagaaagcgattctcgtggtgatgtggagcgaacccgcacgttgaaggtactgggcttgcttgagaagtggttggagcacaacccaaatgcagcttttgcctgcaaggtcttgtctccctatcacatcgaagtgcttcgaaaactggagacgttacaacacaagtacggaggccgggtcgttcggctgtcgtatagccggaactccaccgctgaaatgtattacatctcgggcgttcgggcaaacattgttggctccgttttccaggttcttggagccctcctcggacgctttcgaaggaacgaccaagtgatcatcgacagcccaccgaaactggaactcggcacccgcagtgaccctaggtccaaagttaagcagcaacaacctcaactcgtcgcgcggcgagtgcagcggctacggaatgaaaatctgcacacctggtttgttgatcgtgaacatccttaccagtccttcaactaccacggatcattcgccactgacgacatttcccccggtgggcaaacggtgaatcctatgatgcggcgcatcatgtggccgtgggactttctcactcgtgtcaccacattcatgatgacggacgtgtctacgtattcgcagcaaaagatccttagggagaaggtcgacacgctaacagtcgagccggacacacgcacgaggagcttgaaccggctaatcatgaaacatttttcacgcctgttcaagaagcgaggactacgaccccgaatcctagctccctctgactacgtcaacaatgtgaagagcggagccgccgttggcggctggagctctgagatgccgtggaacggagtcaaggaggcgctagacgaccccgtgttctggagcttggttgaccgagaacgggcgctgcacctgagtggcgattgtgaactttgtgtctacaacaccatgggaaagaaagagaagaaaccttcatcgtttggcgaggcccgtgggtctcgcatcatctggtacatgtggttgggaagtaggttcctcgagtatgaagctctcgggtttctaaatgaagatcactgggttgcacgcgaaaattttccatgtggtgttggaggtgtgggagtgaactacttcgggtactacctaaaggaaatcgcccaaaaagggcagtggctgatagctgacgatgtagccggttgggacactaagatcacggaagcagaccttgaagatgaactatggttgttgctagacatggtgcaagatccttatcatgcgaagctcatttccagtgttttcaagcactgctacatgaacatggtcgccttgttcccccgcaaccaccccaagtacaggagtggcactgtttttgatgtgctgtctcgcacggatcagcgtggttccggacaagtcacaacctacgccctcaacacggtgactaatggcaagaaccaggttggacgaatgttggaagccgagggcctgctggacgcacccctaccggtaattgactcgtggctagacagcaatcttgagcatgttcttagctgcatggttgtcgccggagatgatgttgttgtagcaactaacaatgatcgcttccacactagcttgacgtacatcacgatcacgtcgaaaacaagaaagaacctcaagccaacggagccgtctcctaggtactctagctgggagcaagttgagttctgttcccaccatttccacgccttggtgcttagagacggacgagagattatcgctccttgccgtgaccaacatgaaatcattgggagagctcggatccagaaaggaggtgtggttgacatgtcagctgccgggtgcttggccaaagctcacgctcaaatgtgggggttgtactacttccaccggcgagacctgcggctaggattcgctgcaatcgtgtcggctgttccctcgaattgggttccaacgggccgcgtctcatggtctgtgcaccagcatgctgagtggatgacaacacaagacatgctggaggtatggaacaccgtttggattgtgaacaacccgtggatgaggaccaaagaccttgtcaaagcttggacggacatcccgtatttacctaagtcaaaggacatagcgtgcggcagtttgattggcgaacgtgacagagcttcgtggtccaagaacatcgtggccactgttgagacagcccggaagatcatcgaacaggagaatggaagccagaaatttcccgatggactccaaatcctggggagatacaaagttcaccaggatcccgtgttcgggtaa

SEQ ID NO: 14999 - DNA, 4182 bp, unidentified
  misc_feature 1..4182: note = Synthetic
  source 1..4182: mol_type = other DNA
atgaagaagaaggagtctggagtggtggagagaggacgtggaacgcgtcctcctgccaatcgtggaggaggagctcctccgaagaaggagagagatcgaggaggccaaaaggtctcgctccctgggacttcaagctccatcggatcggaccgtggcaaacgggtcaagggactcggcggacgaaagggactgctcggcaagctggggctgggatgggggtcttttttacagaaagacatcatccaagccatcatgcacctggtcctagtcctacacgccctgttcatgtccattgaccaacgctttaaggcgctcacccggcgggtgcgcgccctcgagaatcgacgatctgccaatcccctactgctcgccactatcatctgcgcggtcgccaccttgtgtggcaccatggtgatcgacatgcaagtgtcctccgctaaaggcgtgcaaatttacgaagggaaaacaaaccggactgactacttgcacttgttcaagcttccaaaagatggatgttggaacggagtgctggtttccaaacactgtcctaaggtcggcgacttggccaaggacttggaggccactgactgcggatctacatggagcgaattcacactgcgatataatcgatgtgtgggaaagaagcgcgtcaagcgggctaccgaacaaccgaaagcggacctacttgcggagatggagatggtaacgttcaagaccatccgtcaaaacaagacgattttcattatcgctctgctctgtgttgccgttgcaaagagatggcctacttgggtcgtcattgttcttgcaattggcacatggtctaccgtcaaaggagaatttgtggaaccattgtacacgctgaaagcggagcgaatgaccatgatgcaaacgatcgttcgtccggaagaggggtacgttatcgctaccccaaacggacttgttgaactgcggactagtgctgccaccatcttgggaggccaatggcttcgtgagcttctagttgactgccaggtcaatgccacctactcaacggatgtgtgtcctggaggttctcagcttaatatggcagagatatcatccaaggagcgggtttgcactacgcaaccgtacaaccgcgggtgggggaccggatgcttcaagtggggaattggttttgttggtacatgcgttgaactccattgtgaagaagggtacaacgtgtcgtccattgcacgatccgccatcatcatgaacatcacggcgagtttccactctgtcagtgacacccagcagttgctaggtgacataccagtcaccttccgatttgctaagctcggaaacgcggctatgacttgtcgcttggaatcagagcaactcctgcttgattattaccacgttaccggcaacaaacgcgaaggactattcctgcggtcccaggtggacaattggcctggagtcatatcgtcttctgggggacgagctggattagagaaggtcgttgtttggggagacacgaaagccaatgagatattggttaaacacgtcatggaaccccagcttgagtgggataatgccattcctacacatgcgggcttccgtgacgttgctttcgtgtgtcaaataatgctggataaactggtcagcggagcgttccgcgattgccaaggattaaaatcatcggtgtttgttcagagtggctttggatacagtggggttgttatcaccacgctgttgcaaccaacgaacgagagctgctcactcaacatggtgtgtcatggatgtcagttgctatcgacgaaaatggtgtttggggctggaaaaccaacgtcccgtgccttcgtcggctgtgggaaccacactggttcactcttgattggcggtgcatctgtccccattgaatgtgtgatgaaccccatctctcaaggatggaggctaacccgacacgttgtggacaagtaccgacgattcggagtaccaggagttgcaggagtttggcgcgatttcgttggaggcttctccctcgggaacctgataaccaactcgacgttgctcgtcctcctagcagcgctggcattcctcgacaagcgtgttgtggtgctcctgctagtctgtggatacttctactacacacgtgctgatgtgggttgtggatttgatcccgacaggaagatcatgtcgtgcggtactggtggcttcgtgtggaagagcatttcccaatggcctgtgaacgatcactctgtccagcttgaagacgacgctgttgtggtgtcacttgtaacggaacaactgaagaccacaaacaaggtttgccttatgtgtgaggatgtcctacaatgtgcggctgcccgaagtgttgtcaagagaatcactcacgtcaacaacgagcttgtctatgcgaacacaaccctgtcttacgggagggtttttcctcgagtgaagaaaagtgtccatggtgtgaagattggggacataacgatgcagctcgccttggctacccttgacggcacgctggacgacgccgaattgggacacctgacaagtggattcttttcacgaggaaaacaaaacgagactgttgaccacaaggttgtccgcgtcatcacgagtggcagtgagtataagaaggtttgttctcaggcattcgcattgcagtatggctttgtgcgattttcgcgcaaggtgtacggatcaaacgtggtcgtgaaaccggttgagaaaccgagtgaagcgtgcccgacgtacctggccggttcatatgttaagaacgatgtcggagggtacactgatggcatgatgtggatgcgtagccgtaaggtgaatggctcatgggagatgttcgagcttgagacgacccaaagccaccaatgcatttggccacaggagtacacatttgatctcacgactcacaacgatagtacattgtttatgccagcccattacggagcgccgatgtccaaagccaaccacatccctgggtacggaactcaacacgagttcccgtggtacaaggccgagataaaattgcggcagggaccagttcctggaactgaagtggagtccatggactcgtgcgatggtagtggatcagcggtcaaagtggaccctgccattgcaaagaagtggtgctgcaaaggatgtttggccaatgatcgcaagcccattcacttcatcgtggatggtgacttcttttacccaatggaaatacgaccaatgactgcgcattcaaagctcatcatcgagaacgagggtgttgaaatagacgagatggatcagatgttcccaaaaaccgtctctccaatccctggagctgaagctttgcttcaggatttcccgggacagcctgccagtagatggatcttctcctttactggtgggcgtgcttctacacctgctaacaattcggactcgacaccgatggggccaacgcacaatcggtacctggctgctattcgtagtttttggtatacctgctggaagctgggtcggttggtcgtggatgggcttgtcttactcgctcgccgctgtgcccaatggaagcgcacttcttgtgcatttttggcttgctttgcagttctcaacatcacatttgtttttcctaggttggttgttgcgcaaacgcgtcgagtcatctatcgaatacgcattaaccgtgttcgccgccgaatgggtaattttgaaattacaaatgttgatcaaacaagcatcccacctcgagcacgtcctgttccctctgtacgtgaagttggcactcagtatgagatcccagtttgcccctgtggacagcatgattgccctgaattacgtggtgacgcacccgttgatggcggccctggtgagcctcggtgttgccctggtgatctttgttacacacgtctgcgcgaattggaggcggtctccaaacttgtggaagagtggacttcgggcttcgaagcgatcagctctattgggcgtgtactttgtagtgttgtacgtggtttcagtcttactgcgattcacgggtctggagagctctgccgtcgctgtgttcctggggggtctgctgatcggactagtgaccaggctggttcctccgacgaaatatgtacttgtcccggtgccgggtacgagcgtgccgagcaactgcgaagaatcattcacaagactaccgccaggattagaaggtgtctacggacccagtggagtggaattcctgaactacactga

SEQ ID NO: 15000 - DNA, 48 bp, unidentified; identical to SEQ ID NO: 1304
  misc_feature 1..48: note = Synthetic
  source 1..48: mol_type = other DNA

SEQ ID NO: 15001 - DNA, 15 bp, unidentified
  source 1..15: mol_type = other DNA
  misc_feature 1..15: note = Synthetic
atggtgcatccatag

SEQ ID NO: 15002 - DNA, 15 bp, unidentified
  misc_feature 1..15: note = Synthetic
  source 1..15: mol_type = other DNA
atggtgcatccatag

SEQ ID NO: 15003 - DNA, 21 bp, unidentified
  source 1..21: mol_type = other DNA
  misc_feature 1..21: note = Synthetic
atagaggttataagagtgtaa

SEQ ID NO: 15004 - DNA, 213 bp, unidentified
  misc_feature 1..213: note = Synthetic
  source 1..213: mol_type = other DNA
ctgccaggcagaagctcaaagatgcagaaagagcggtggaattggaccccgatgatgttaacaaaagcacattacagagcagacgggcagctgtgtctgcattggagaccaaactcggagaacttaagcgggaactggctgatcttattgcagctcagaaattggcttcaaaacctgttgatccaacagggattgaacctgatgaccatctaa

SEQ ID NO: 15005 - DNA, 213 bp, unidentified; identical to SEQ ID NO: 15004
  source 1..213: mol_type = other DNA
  misc_feature 1..213: note = Synthetic

SEQ ID NO: 15006 - DNA, 213 bp, unidentified
  source 1..213: mol_type = other DNA
  misc_feature 1..213: note = Synthetic
ctgctcggcaaaagcttaaggatgccgagaaggcagtggaggtggacccggatgacgttaacaagagcacactacaaagtagacgggcagctgtgtctacattggagaccaaactcggagaacttaagaggcaacttgcagatttggtggcagctcaaaaattggctacaaaaccagttgatccaacagggcttgagcctgatgatcatctaa

SEQ ID NO: 15007 - DNA, 213 bp, unidentified; identical to SEQ ID NO: 15006
  misc_feature 1..213: note = Synthetic
  source 1..213: mol_type = other DNA

SEQ ID NO: 15008 - DNA, 1302 bp, unidentified
  source 1..1302: mol_type = other DNA
  misc_feature 1..1302: note = Synthetic
aaggagcaaacaatgggtgatattaaagaattagagaacgagctaaaaaacacagaaacacaacttgaattggccacaaagaagctagaaaaggcaactgcagactacgagcatgatgatgatgaaacaaacaaggcaagttatgaacggaggacactggaggtaagtcagctgcaagctaaaatggcacaactgaaaaaagcattggcagatgcaacagctaccggtaggcaatcccaggctgcagctgacgatccaactgggaaagaaagtgatgaccatttacagcaaagatccatgctcagatacggaaataccctggatatgaatgctatagaccttgatgagccaagcgggcagacagcagattggctaagtataataacatatatactgacattcgtagatactatactcttaaagggactctacatgctgacaacaagagggcgacagacagtaaaggacaacaagggcactcggattcggctgaaggatgatacatcatttagtgacactgctgctgggagaaagcctaaaatgttgtatatttctatgcctaatgcccagtcgagtatgcgtgctgatgagatcactcctggacgatataggactgtggtctgtggattgtatcctgcccaaattagacaaagacagatgatcagtcctgtgatgggtgtcattgggtttccagcaattgcgaaaaactggacagatagggttgagaagttcttagatagtgactgcccgttcttaaagcaaacactgcaaatcacaattggggcacttgacaagaataaagacttcttatttgatagacaaaacacacttgataaaatggttacagaagaagcacgccaaataaagcaaatggttgagcaagcctcccagactgtgccagctggcttagattcaccatttgctgtttgggtgtttgcaggtgcacctgatcgctgtcctccaacaagtctttatgtggcaggggtggctgagcttggggcattcttttcaatcctacaggatatgaggaatacaataattgcatcaaagactgttgggacagcagaagaaaagctgaaaaagaagtcctcattctaccaatcctatctgagaaggacacaatcaatgggggtccaactcgatcaacgaattattatcctttatatgagtttctggggaaaggaggctgttgaccatttccacttgggagatgatatggacccagaactccgtgcaacggctcaaaatctcattgaccaaaaggtcaaagagatttccaacatggagccaatgaaactgtaa

SEQ ID NO: 15009 - DNA, 75 bp, unidentified
  source 1..75: mol_type = other DNA
  misc_feature 1..75: note = Synthetic
aggcaactgcagactacgagcatgatgatgatgaaacaaacaaggcaagttatgaacggaggacactggaggtaa

SEQ ID NO: 15010 - DNA, 93 bp, unidentified
  misc_feature 1..93: note = Synthetic
  source 1..93: mol_type = other DNA
atatcttcgaaaacaaaaatagatattatttttgcagtacaaactattgtttttatatggtttatattccactttgttcattcggcgatttaa

SEQ ID NO: 15011 - DNA, 162 bp, unidentified
  misc_feature 1..162: note = Synthetic
  source 1..162: mol_type = other DNA
atgataagtaattacgagccgttgctgctgttagttataacatgctgtgtactactatttaattttaccatatcttcgaaaacaaaaatagatattatttttgcagtacaaactattgtttttatatggtttatattccactttgttcattcggcgatttaa

SEQ ID NO: 15012 - DNA, 162 bp, unidentified; identical to SEQ ID NO: 15011
  source 1..162: mol_type = other DNA
  misc_feature 1..162: note = Synthetic

SEQ ID NO: 15013 - DNA, 162 bp, unidentified
  source 1..162: mol_type = other DNA
  misc_feature 1..162: note = Synthetic
atgataagtaattacgagccgttgctgctgttagttataacatgctgtgtactactatttaattttaccatatcttcgaaaacaaaaatagatattatttttgcagtacaaactattgtttttatatggtttatattccactttgtttattcggcgatttaa

SEQ ID NO: 15014 - DNA, 72 bp, unidentified
  misc_feature 1..72: note = Synthetic
  source 1..72: mol_type = other DNA
atggagaggcaaacatacaggaggaaaggctatatgagctactctctgacccacgctccgcgctcggcctag

SEQ ID NO: 15015 - DNA, 54 bp, unidentified
  source 1..54: mol_type = other DNA
  misc_feature 1..54: note = Synthetic
aggagcaaaggctatatgagctactctctgacccacgctctgcgctcggcctag

SEQ ID NO: 15016 - DNA, 54 bp, unidentified; identical to SEQ ID NO: 7861
  source 1..54: mol_type = other DNA
  misc_feature 1..54: note = Synthetic

SEQ ID NO: 15017 - DNA, 57 bp, unidentified; identical to SEQ ID NO: 7862
  source 1..57: mol_type = other DNA
  misc_feature 1..57: note = Synthetic

SEQ ID NO: 15018 - DNA, 18 bp, unidentified
  misc_feature 1..18: note = Synthetic
  source 1..18: mol_type = other DNA
atgatcgatacagtttaa

SEQ ID NO: 15019 - DNA, 147 bp, unidentified
  source 1..147: mol_type = other DNA
  misc_feature 1..147: note = Synthetic
atggtcatcggtctagtcatattcgtgtctgtggcggccaccatcgtcggtgtgttgtctaacgtattggacatgcttatgtacgtagaagaaaataatgaagaggatgctaaaatcaaggaggagcaagaattactgttgctataa

SEQ ID NO: 15020 - DNA, 60 bp, unidentified
  source 1..60: mol_type = other DNA
  misc_feature 1..60: note = Synthetic
atgaagaggatgctaaaatcaaggaggagcaagaattactgttgctataatgatacataa

SEQ ID NO: 15021 - DNA, 15 bp, unidentified
  misc_feature 1..15: note = Synthetic
  source 1..15: mol_type = other DNA
atacagtttaagtga

SEQ ID NO: 15022 - DNA, 150 bp, unidentified
  source 1..150: mol_type = other DNA
  misc_feature 1..150: note = Synthetic
atggtcatcggtctagtcatattcgtgtctgtggcggccgccatcgtcggtgtgttgtctaacgtattggacatgcttatgtacgtagaagaaaataatgaagaggatgctagaatcaaggaggagcaagaactactgttgctatattga

SEQ ID NO: 15023 - DNA, 480 bp, unidentified
  source 1..480: mol_type = other DNA
  misc_feature 1..480: note = Synthetic
atgaaccggcaagcttcgggccgctgccgtcgcgcgctgtggatttcggcgcgcgtgctttttctgtgcgccttcgtcacgctagcgggcctgtacctgcgacagctgctgctcgcacccgcgccgcggcggttgcccgcctgccgcgagcactggctggcgttcgacggctggtgttaccgggtcgcggggccctcgagcaatgcgagcaaggcgcgcgcgctctgcgcggcgcaaggcgccgagctggtccctgcactccgcacgcacgtctcggtggtagctcgcgtgctctcacaaacccgattctggattgatgcgcaccaaatctccgggagatggctcgactcgcaaagcaaatcgttgggctggacaggtgcaggtagcggcaactgcgcagccgccgagtatggcgtgtttataccccgcgtgtgctcgctcgtgctgccggtggtctgcgccgtgcctttctacacttga

SEQ ID NO: 15024 - DNA, 33 bp, unidentified; identical to SEQ ID NO: 7870
  misc_feature 1..33: note = Synthetic
  source 1..33: mol_type = other DNA

SEQ ID NO: 15025 - DNA, 24 bp, unidentified
  source 1..24: mol_type = other DNA
  misc_feature 1..24: note = Synthetic
atgaatttgtccgtatacagctaa

SEQ ID NO: 15026 - DNA, 21 bp, unidentified
  source 1..21: mol_type = other DNA
  misc_feature 1..21: note = Synthetic
atgcaatctgtgggaaaataa

SEQ ID NO: 15027 - DNA, 39 bp, unidentified; identical to SEQ ID NO: 7873
  source 1..39: mol_type = other DNA
  misc_feature 1..39: note = Synthetic

SEQ ID NO: 15028 - DNA, 204 bp, unidentified; identical to SEQ ID NO: 11912
  source 1..204: mol_type = other DNA
  misc_feature 1..204: note = Synthetic

SEQ ID NO: 15029 - DNA, 1155 bp, unidentified
  misc_feature 1..1155: note = Synthetic
  source 1..1155: mol_type = other DNA
ataaccatggctcctacccaatccaaagtcagaatccacaatctggccgaagctcacgagaagacactaagagctttcccaatagaagttgaacaaaacccagaagggaaaaaattattagtaaaacagattagaataagaacattaggacatgcagatcattcaaatgattcaatttgctttctgaatacctatgggtttattaaagaagcagtcagccagacagaattcatgagagcaggacagaaatcagagagcaaaaacactctaactgcttgtatgttaccctttgggcctggtcctaacattgggtccccccaaaagatgttagaatatgctgaagacattaaaatccatgtgagaaagacagcaggttgcaaagagcagattgtattctctctagacaggacacctcaggttttcaggggatttcaattccctcgggatcgatatgcatgtgttccatccgataaatatataaaatcaccagggaagttagtcgcaggacccaattattgctacataattacttttctttcactgacattctgtcccagcagccaaaaattcaaagtacctagacctgtactaaacttccggtccacacgaatgagaggtatacatctagaaattatcatgaagattacttgttctgaaaacagtcctattagaaagacattgataacagatgatcttgaaaatggtccaaaagcatctgtgtggattcacctctgcaatctttacaaaggtagaaatcctataaagatatatgacgaggcgtattttgcagagaaatgcaaacagatgctattaagtgtaggtattagtgatttgtgggggcccacaatcgcagtacatgcaaatgggaaaatcccaaagtctgccagcctttatttcaactcaagaggttgggctctgcatcctatagctgatgcatctcctacaatggcaaaacaactttggtccataggttgtgagatcatggaagtcaatgcaattttacaaggctctgattatagcgccctggtagatcatcccgatgtaatctatcggaaaattagaattgatccagcaaaaaagcaatacgcacactctaaatggaacccattcaagaaggcaatatccatgcctaatctcactgatgacagtatctaa

SEQ ID NO: 15030 - DNA, 393 bp, unidentified
  misc_feature 1..393: note = Synthetic
  source 1..393: mol_type = other DNA
attatcagctcttgttttttcagagaacggtgtacttttgaaactataatgtcactgcatgaattaataaaacaaactatgtccaaaaatttagaaaaaaaacattatgagttgttaaaattaaaacttggtgaagatcatcctcttagcgttcgacagcaaattcacgctctcaatcaaaatcttgtatcagaaaatctcgaacagtcccagataattacttctttgacaaaaatgttaaaggatcaaaagctgcagctgaaagcgcaaaggaaaaatgctgctcagctagaatgtgtagatttggatgacattttggatacggcagcggaagtgaaatccgtcaccgacaatataaaagaaactttactggccggattagaatcagactaa

SEQ ID NO: 15031 - DNA, 90 bp, unidentified
  source 1..90: mol_type = other DNA
  misc_feature 1..90: note = Synthetic
ttggtgaagatcatcctcttagcgttcgacagcaaattcacgctctcaatcaaaatcttgtatcagaaaatctcgaacagtcccagataa

SEQ ID NO: 15032 - DNA, 210 bp, unidentified
  misc_feature 1..210: note = Synthetic
  source 1..210: mol_type = other DNA
ataggtcgctttttttcactcacggatgccaatgttcccggagtgtatgcttcttctcgaatcatccatgccggccaccgggaaggtctctcggtgatgcttttcaatcatggcgacagcttctacgagggtcgcgccggagaccccgtagcctgcctggtgctggaaagagtgatttacccacctgttcgccaggctagcatggtttaa

SEQ ID NO: 15033 - DNA, 66 bp, unidentified; identical to SEQ ID NO: 7881
  misc_feature 1..66: note = Synthetic
  source 1..66: mol_type = other DNA

SEQ ID NO: 15034 - DNA, 978 bp, unidentified; identical to SEQ ID NO: 14739
  source 1..978: mol_type = other DNA
  misc_feature 1..978: note = Synthetic

SEQ ID NO: 15035 - DNA, 21 bp, unidentified
  misc_feature 1..21: note = Synthetic
  source 1..21: mol_type = other DNA
atgcaatctgtgggaaaataa

SEQ ID NO: 15036 - DNA, 246 bp, unidentified
  misc_feature 1..246: note = Synthetic
  source 1..246: mol_type = other DNA
atgggcacaaagtgctgtaaaccagtatcttgcggcatgtgtaagaaaaccgaaaacaccctgatggattacaagggaaatcctatattactaacgacggaatttactgttttgaccgataccgaatcggaagaggaagggatggcagatcttgaaaagcccctgcttgaaagagtacaggccacattagctgctaaatgtgatacggaagttgaaaaaaaactgccgcttaaatcaaaaaaatga

SEQ ID NO: 15037 - DNA, 243 bp, unidentified
  source 1..243: mol_type = other DNA
  misc_feature 1..243: note = Synthetic
atattaagctttcgcgcagcgcgctttatccgactcgctgtcgagacggctttgccggcatgtccctactcaccaaagccgccgccgaagcctggggcacctatctccgacagcgcgacgagcgctgcgaagatgctatccgctgcgactacggcgttttccaatttagaaacaccgtctttcaaaagacgttatcgatgctgcaaggcctctatctgcgccagtacgatcctccggcgctga

SEQ ID NO: 15038 - DNA, 756 bp, unidentified
  source 1..756: mol_type = other DNA
  misc_feature 1..756: note = Synthetic
atgagtctactgctagaaaacctcatcgaagaagataccatattttttgcaggaagtatatctgagtatgatgatttacaaatggttattgccggcgcaaaatccaaatttccaagatctatgctttctatttttaatatagtacctagaacgatgtcaaaatatgagttggagttgattcataacgagaatatcacaggagcaatgtttaccacaatgtataatataagaaacaatttgggtctaggcgatgataaactaactattgaagccattgaaaactatttcttggatcctaacaatgaggttatgcctcttatcattaataatacggatatgactgccgtcattcctaaaaaaagtggtaggagaaagaataagaacatggttatcttccgtcaaggatcatcacctatcttgtgtattttcgaaactcgtaaaaagattaatatttataaagaaaatatggaatccgcgtcgactgagtatacacctatcggagacaacaaggctttgatatctaaatatgcaggaattaatatcctgaatgtgtattctccttccacatccatgagattgaatgccatttacggattcaccaataaaaataaactagagaaacttagcactaataaggaactagaatcgtatagttctagccctcttcaagaacccattaggttaaatgattttctgggactattggaatgtgttaaaaagaatattcctctaacagatattccgacaaaggattga

SEQ ID NO: 15039 - DNA, 756 bp, unidentified
  source 1..756: mol_type = other DNA
  misc_feature 1..756: note = Synthetic
atgagtctactgctagaaaacctcatcgaagaagataccatattttttgcaggaagtatatctgagtatgatgatttacaaatggttattgccggcgcaaaatccaaatttccaagatctatgctttctatttttaatatagtacctagaacgatgtcaaaatatgagttggagttgattcataacgaaaatatcacaggagcaatgtttaccacaatgtataatataagaaacaatttgggtctaggagatgataaactaactattgaagccattgaaaactatttcttggatcctaacaatgaagttatgcctcttattattaataatacggatatgactgccgtcattcctaaaaaaagtggtaggagaaagaataagaacatggttatcttccgtcaaggatcatcacctatcttgtgtattttcgaaactcgtaaaaagattaatatttataaagaaaatatggaatccgcgtcgactgagtatacacctatcggagacaacaaggctttgatatctaaatatgcgggaattaatatcctaaatgtgtattctccttccacatccataagattgaatgccatttacggattcaccaataaaaataaactagagaaacttagtactaataaggaactagaatcgtatagttctagccctcttcaagaacccattaggttaaatgattttctgggactattggaatgtgttaaaaagaatattcctctaacagatattccgacaaaggattga

SEQ ID NO: 15040 - DNA, 756 bp, unidentified
  source 1..756: mol_type = other DNA
  misc_feature 1..756: note = Synthetic
atgagtctactgctagaaaacctcatcgaagaagataccatattttttgcaggaagtatatctgagtatgatgatttacaaatggttattgccggtgcaaaatccaaatttccaagatctatgctttctatttttaatatagtacctagaacaatgtcaaaatatgagttggagttaattcataacgagaatatcacaggggcaatgtttaccacaatgtataatataagaaacaatttgggtttaggtgatgataaactaactattgaagccattgaaaactatttcttggatcctaacaatgaggttatgcctcttattattaataatacggatatgacggccgtcattcctaaaaaaagtggtaggagaaagaataagaacatggttatcttccgtcaaggatcatcacctatcttgtgtattttcgaaactcgtaaaaagattaatatttataaagaaaatatggaatccgcatcgactgagtatacacctatcggagacaacaaggctttaatatctaaatatgcgggaattaatgtcctgaatgtgtattctccttccacatccatgagattgaatgccatttacggattcaccaataaaaataaactagaaaaacttagtactaataaggaactagaattgtatagttctagccctcttcaagaacccattaggttaaatgattttctgggactattggaatgtgttaaaaagaatattcctctaacagatattccgacaaaggattga

SEQ ID NO: 15041 - DNA, 48 bp, unidentified; identical to SEQ ID NO: 1304
  misc_feature 1..48: note = Synthetic
  source 1..48: mol_type = other DNA

SEQ ID NO: 15042 - DNA, 270 bp, unidentified
  source 1..270: mol_type = other DNA
  misc_feature 1..270: note = Synthetic
atcgggcaggcgatccgtacagcaacgatgggcctacctcttttcaaggtttattttgatctgctttatgatgaaggcatctgtttttcaggtatggacccttatgaacagtggcctcttgtgagagtgaagattgtgttcgggtgcagagagggggtctggctatgtgtgcagctcttcctacacctggtgtccctgatcttcatcatccttatcaatatagaaagtctgaagcactctggaagaaacagctctcacaagcccacctaa

SEQ ID NO: 15043 - DNA, 234 bp, unidentified
  misc_feature 1..234: note = Synthetic
  source 1..234: mol_type = other DNA
ctgttaatattatatttttgggatccgcaatgtccagggtatcggagtatggggtaccggaaggtgttcgggaatctgatagcgatacagactctgtgtttatgtatcagcatacagagcttatgcagaacaacgcgtcgccactcgtcgttcaaacaagaccaccggcggttcttattccactggttgatgtcccaaggccacgatcccggagaaaggcgtccgcgcaactga

SEQ ID NO: 15044 - DNA, 3450 bp, unidentified
  source 1..3450: mol_type = other DNA
  misc_feature 1..3450: note = Synthetic
atttcaccacaaaaccccattatctctgtttctgtgatcaaatccacaaagatggctgatgaaaacgaaacggtagtttctgctcccgtttctactgctgcttggatctatgttttcccaaaagataaagaacttttggatgttttatctgttttatcgttaatggagagaaattctcctatagttatttcgccgttgttaatgaatttgaccgtagaaaacgatttctcgaccacggttaaaacacctatcactaattttggaggcacaattctaactaaaattacgtcttttatgcccgtgtgttttttttttcatggaactgagcagttagttggtatggccgaagatcatggtgatcttattcgattatgtgagcaaaccagacaaaaatttcacttgcaatcgtttgaggtgcctacagcacgcaaagtaatcgatatcaaagctctttgttctgctgtcggcaaagatgcagattctgttatttgtcatgttgcgtgtggaaacggtttcaaagagttgttgttcgctggtctgttaattccttgtgttgaagaacaaattcaagtacaagttggggagtattcgtgtgtgaaaattcctctatattccgcaactttatttgaaactgaagaaacgatttctttatcttcctgtacagaatttattcaggaacgaggattttttctgcctgcgttaagtgaaacgcttttttattatgtttttacatcatggggtacaacattacgattttctaatactaaggaattaatcgatgctggcctgaaacaatttacacaggatggggagcaaactgtcaaattagcaccccataaaacttatctgggtatctccggacagaaaatttcagcggtcgagaaagattttttgatgttggttgattccgttgtgacagaattatcgtttagtcatgtagccgaatatctggattcggtatatgaccctagtcagataatgaattttaatgactggccaatcataagaaactcagagacacacgctgaacgcatggcgcagctcacgaatttaaagttacatctgtctagtcatcttgctgttttgatctttgccccaaattctatcttatattgctcaaaattggcatttataccaaacgtgaaacaagcgtttaattcggtgatgactcaggaattactgctgagatctttgtctttttgtaatgcgttgtcgtctttgagtgacgatgtgtataacgataatagaaaaattatcaaatgtgattcgacatcaggcaaagatgacaaattttcagctaatcacttggcttatgcctgtgcgacttctccacagctgctttcttttgtggtgtggaatttaaatcgtatgagcgtttataacgcgggtaatgcgcatactgagatttacaatcatctggtaaattgttcggcgaatttatgtgaattctgtgatgggaaatgttgtcaatcgtgtattggaactgccatggtgcgggtcggtactcgtttaccggcaataccaaagaatgttaaaaaggaaccacttgttatgagcatgttttctcggtattatgccgaggttgatatattaggctcttttggcaggaagcctgtcagcgagctcaaagagattggaaaagatcaacaaaacacgctctcactggacaggggtaaattcgtatctcagatcttcgattactgtaaaaaaaattctctgattgatcctgtaacaggcgaagatactttcaatgttcgaagtaaaaaagattttgtttctataattcacggattaacacagtgtatcgaggaatgtgtttctagatgcattgttgaaatgagaaggacacaaacgcctagagaacagatagaaaattgtctacagtcatttaatgtagatacgaccccttatgcaactgccttttctccttttttgacgttttcatattataaggtcattttgacggttttgcagaacctcgcattgatagtggcttcaggtcatgttgtcgatagaccttgtaccggtaattcaatttctaaatggctcgttcagcagtaccagtcattatacggaacgtttcacagcagctatctcaaaaagggttttctgaatacgagaacagttaaagtcgcttcaaatgttgatatggagcaaatcttagattgcgatctatataaatcgggtaaatatgtgaaaactacgattcaggcgaaactttgccgtttgtctatgcaatgtcttcgagattttagaataaaaaatagaccgttcaacaagtctagtaagacagcacacaacaatccttattttaaaaaaaacgtgaaacataagaagaatcccttgtctggctgtatctcctttcttttatttaaatatcatgataaattgtttccgaatgtgaagatttcgtgcttagagctatggcaacgttttctgctcaacaatgttccgaaaactttagatattggtaaccccgaagaagttaaaacttttattaaatttgcattcagtattacgaatacctatgatgagatagatattatcgacatacagccagagtgtctctcaacttttatagattgttattttcataacaaatttttgtcggctttaggttttcatgactacttgactagtttacatggtcttacatctaagctggttacgcagaatcctgtgttgtttcctgtggtgttagacaagcagcctaaattttcttctattcaggaatatttagtttatgttaaaaagttagttttggatggcgttccgaatcctgtgattgcgtcactgtccaaagaacccaattttggtacaattttcacaagtcgatctttggttacatttggtttgacattagagaaatttgtgagtttggctaatagggaatattttcagtttggccagttaggttggataggcggaagtggcgtggataggaacttaaaccctacctcttctgcattgcaggattttagatttatgagacagaaaacgattattgctacaaagttttcagaagttatagtgaaaaaggttcggcgtgaggcaattatgtttgatacggaagtagttaagggcaaggttctcagcattgttgagaatttaactaacgatattgatccagaattattaataatagctgaggtgatgagggatagggaagacaagccgactatggatgatatgcttttttttgtggatggtagggaagccttagcggcatccataatgcttaaattgaatcacttagttgatatgaatgtgaaagacttttcaataactaatctgcagtcggtattcgagacggtgtcttcaaacgatgctccggtctatgacttttctgaaattctagcggaggaggacgatcaaggaaacggtgtattaaaatgtgatgaaacggaaaccgaaacagatgagccgatgactaagaaaaaccgattataa

SEQ ID NO: 15045 - DNA, 333 bp, unidentified
  source 1..333: mol_type = other DNA
  misc_feature 1..333: note = Synthetic
acgcagcaggtcatttaccatatgtactatatgaccctacagctacagatgcaaaacaacaccacagacatggatatgaaaagcctgaagaattgtggacagccaaaagccgtgtgcacccattgtaaacactccccaccgtgccctcagccaggatgcgtaactaaacgcccaccagtaccacccagactgtacctgccccctcctatacctataagacagcctaacacaaaagatatagacaatgtagaatttaagtatttaaccagatatgaacaacatgttattagaatgttaagattgtgtaatatgtatcaaaatttagaaaaataa

SEQ ID NO: 15046 - DNA, 756 bp, unidentified
  source 1..756: mol_type = other DNA
  misc_feature 1..756: note = Synthetic
atgagtctactgctagaaaacctcatcgaagaagataccatattttttgcaggaagtatatctgagtatgatgatttacaaatggttattgctggtgcaaaatccaaatttccaagatctatgctttctatttttaatatagtacctagaacgatgtcaaaatatgagttggagttgattcataacgagaatatcacaggggcaatgtttaccacaatgtataatataagaaacaatttgggtctaggcgatgataaactaactattgaagccattgaaaactatttcttggatcctaacaatgaggttatgcctcttatcattaataatacggatatgactaccgtcattcctaaaaaaagtggtaggagaaagaataagaacatggttatcttccgtcaaggatcatcacctatcttgtgtattttcgaaactcgtaaaaagattaatatttataaagaaaatatggaatccgtatcgactgagtatacacctatcggagacaacaaggctttgatatctaaatatgcgggaattaatatcctgaatgtgtattctccttccacgtccatgagattgaatgccatttacggattcaccaataaaaataaactagagaaacttagtactaataaggaactagaatcgtatagttctagccctcttcaagaacccattaggttaaatgattttctgggactattggaatgtgttaaaaagaatattcctctaacagatattccgacaaaggattga

SEQ ID NO: 15047 - DNA, 1143 bp, unidentified
  source 1..1143: mol_type = other DNA
  misc_feature 1..1143: note = Synthetic
atgagcagaatcatactctgttgcgaacagaacgagcgtcatcgtcgcgccggcacgatgcagctggcccagcgcctgtgcgagctgctgatgtgccgtcgcaaagccgcgcctgtggccgattacgtgctgctgcagcctagcgaggacgtggagctgcgcgagctgcaggcgtttctggacgagaactttaagcagctggagatcaccccggccgacctgcgaaccttttctcgcgacacggacgtggtgaaccacctgctgaagctgctgccgctctataggcaatgccagagcaagtgcgcgttcctcaagggctatctctcggagggctgtttgcctcacacgcggccggcggccgaggtggagtgcaagaaatcgcagcgtatcctagaggccctggacattctcatcctcaaactggtggtgggcgagtttgccatgtccgaggccgacagtctggagatgttgctggacaagttctccacggatcaggcctcgctggtggaggtgcagcgcgttatgggcctggtggacatggactgtgagaaaagcgcgtacatgctcgaggccggcgcggctgcgacggttgcaccaccgacgccaccggcggtcgttcagggggaaagcggcgtccgcgaggacggggaaacggtcgccgccgtgtcggcctttgcctgttcctcggtttcggactcgctgatccccgaggaaacgggggtcacgcgtcctatgatgagtttggctcacattaacaccgtctcctgtcccaccgttatgaggttcgaccagcggctgctggaagagggcgacgaggaggatgaagtgaccgtgatgtcgccgtcacccgagcccgtgcaacagcagccgccggtcgagcccgtgcagcagcagccccagggacgcgggtctcaccgtcggcgctacaaggagtcggcgccgcaggagacgctgcctacgaatcacgaacgcgagattttggatctcatgcgacacagccccgacgtgcctcgggaggcggtgatgtcaccgaccatggtcaccatacctcctccccagataccctttgtgggttccgcgcgtgaactcaggggcgtgaagaaaaagaaacccacggcggcggccttgctgtcctccgcgtga

SEQ ID NO: 15048 - DNA, 129 bp, unidentified
  source 1..129: mol_type = other DNA
  misc_feature 1..129: note = Synthetic
acgtgctgctgcagcctagcgaggacgtggagctgcgcgagctgcaggcgtttctggacgagaactttaagcagctggagatcaccccggccgacctgcgaaccttttctcgcgacacggacgtggtga

SEQ ID NO: 15049 - DNA, 24 bp, unidentified
  misc_feature 1..24: note = Synthetic
  source 1..24: mol_type = other DNA
atgctaatgctaattacaacatag

SEQ ID NO: 15050 - DNA, 120 bp, unidentified; identical to SEQ ID NO: 7906
  source 1..120: mol_type = other DNA
  misc_feature 1..120: note = Synthetic

SEQ ID NO: 15051 - DNA, 24 bp, unidentified
  misc_feature 1..24: note = Synthetic
  source 1..24: mol_type = other DNA
atgctaatgctaattacaacatag

SEQ ID NO: 15052 - DNA, 15 bp, unidentified
  source 1..15: mol_type = other DNA
  misc_feature 1..15: note = Synthetic
atgggtacggtgtaa

SEQ ID NO: 15053 - DNA, 36 bp, unidentified; identical to SEQ ID NO: 7909
  misc_feature 1..36: note = Synthetic
  source 1..36: mol_type = other DNA

SEQ ID NO: 15054 - DNA, 51 bp, unidentified; identical to SEQ ID NO: 7910
  source 1..51: mol_type = other DNA
  misc_feature 1..51: note = Synthetic

SEQ ID NO: 15055 - DNA, 564 bp, unidentified; identical to SEQ ID NO: 14606
  misc_feature 1..564: note = Synthetic
  source 1..564: mol_type = other DNA

SEQ ID NO: 15056 - DNA, 63 bp, unidentified; identical to SEQ ID NO: 7914
  source 1..63: mol_type = other DNA
  misc_feature 1..63: note = Synthetic

SEQ ID NO: 15057 - DNA, 63 bp, unidentified; identical to SEQ ID NO: 7914
  misc_feature 1..63: note = Synthetic
  source 1..63: mol_type = other DNA

SEQ ID NO: 15058 - DNA, 51 bp, unidentified; identical to SEQ ID NO: 7917
  source 1..51: mol_type = other DNA
  misc_feature 1..51: note = Synthetic

SEQ ID NO: 15059 - DNA, 66 bp, unidentified; identical to SEQ ID NO: 7918
  misc_feature 1..66: note = Synthetic
  source 1..66: mol_type = other DNA

SEQ ID NO: 15060 - DNA, 294 bp, unidentified
  misc_feature 1..294: note = Synthetic
  source 1..294: mol_type = other DNA
atgagtaaacttcttattgagatcaatagtgatgacattaaaaagctgagagataatgaagaacccaattcacctaagataagagtgtacaatactgttatatcatacattgagagcaatagaaaaaacaacaagcaaacaatccatctgctcaaaagactaccagcagacgtgctgaagaagacaataaaaaacacattagatatccacaaaagcataatcataagcaacccaaaagagtcaaccgtgaatgatcaaaatgaccaaaccaaaaataatgatattaccggataa

SEQ ID NO: 15061 - DNA, 18 bp, unidentified
  misc_feature 1..18: note = Synthetic
  source 1..18: mol_type = other DNA
atgacattaaaaagctga

SEQ ID NO: 15062 - DNA, 54 bp, unidentified
  source 1..54: mol_type = other DNA
  misc_feature 1..54: note = Synthetic
ctgataatacttaaaaaaataataatatcatttacaattaatagtataaactaa

SEQ ID NO: 15063 - DNA, 126 bp, unidentified; identical to SEQ ID NO: 7922
  misc_feature 1..126: note = Synthetic
  source 1..126: mol_type = other DNA

SEQ ID NO: 15064 - DNA, 36 bp, unidentified
  misc_feature 1..36: note = Synthetic
  source 1..36: mol_type = other DNA
atagtgatttcccgtgacagtattaacgtgtggtga

SEQ ID NO: 15065 - DNA, 1608 bp, unidentified
  source 1..1608: mol_type = other DNA
  misc_feature 1..1608: note = Synthetic
atggagttattggaccacgacatttataagggacccgtccgagaacgggtcacgtataccattcccaaccatccctatctctcgcttaccgttcatcattccagggaacttgatgttgatctgaaagacataacggaggagatgattatagatagcggcacgttgaccgcagaggatctgtttatgacccgcggcttacgattttgtgacgatagtgttctctgggcggctctggcggagaaagtttctgttgaattccagaggcgtggaaagacgaccatggatctctcggcttttatgtctctcttagaacggttaacttttgaggacgaaacgtcagttttttatcgactcctgaccaagtgcaccgcgctggcgcacttctcgattctggagtacatcgtcgatggggagaagagggatactatctcggcgcattttaaccgtcttttggagttgttggactccctcttcctgcagttcctcatgttgaggaacaggagcgagtccaatactctgttgaccctgttcgatattttgcccaatcccaaggagatctatggcgacgcggcgtctccgacgagtgtgctcttgaaacactttttgtccgatcacatctttgtcgcgtacgcttcttcttatcgctttgtgtcttctgtgctctgtagttgcgatcagtgccgggcgtctctctttcggatctatctgggtaagaaagattcccgggccgtgcacatatccgatatttcagaattcgatccggctgatctcattttaggccagctgcacctcgacgcgcgtgaggcggtcgctctccgggcggagatcgaccgagatctcggctcttctctcatccttaactctatggaaaggcggcatttgcccattcttcatgataagcagttggggagagggcattttgaacgtaacatcttgaaggtgtactgcaacatcgttctgtgtctgtttctactgagacgcgtcaaacagcgcatcgtgagtgatctcactgccattgctcgtttcttcgtaaaagcgatctccgaaatggagcgttgcatcgataccgtttctggcctccgcggtgtcaggatcaaactgttagttgtcagttctcagttcgagattaaagatcccatgcgcgtccctaggttgtgttttttctttcttgagatcgtggcgattctcgtatcgggttatgacaaggaacggcatcgcgttcgtgctctcttagagcatctgtgccttaaaaagatctgtctcggcgacctgtgtgcatccatgcgactcgctcgcgagataaggcacgacgtcctggagggcttcctcaatactctggagttatcttacatgtcgaatccggttaggttttttcgttttcacgactgcaacctttacgggacccatatgtggagtggggtgtatccgaacgtcgttccttacgctgtgcgcggcggcggctcgtttgacatcaggctgcaggagcaccggagacgtcagaagcgaatagtcgtcagacgtaggcttataagacgcgtgcagcaacgagggttagacattcgtgaagcgcgccgcgttcctaagccggcttgtgtgacctttatctga

SEQ ID NO: 15066 - DNA, 54 bp, unidentified; identical to SEQ ID NO: 7928
  misc_feature 1..54: note = Synthetic
  source 1..54: mol_type = other DNA

SEQ ID NO: 15067 - DNA, 27 bp, unidentified
  source 1..27: mol_type = other DNA
  misc_feature 1..27: note = Synthetic
atgaataaactcaactcttttgtttaa

SEQ ID NO: 15068 - DNA, 78 bp, unidentified; identical to SEQ ID NO: 2331
  misc_feature 1..78: note = Synthetic
  source 1..78: mol_type = other DNA

SEQ ID NO: 15069 - DNA, 33 bp, unidentified; identical to SEQ ID NO: 7931
  misc_feature 1..33: note = Synthetic
  source 1..33: mol_type = other DNA

SEQ ID NO: 15070 - DNA, 27 bp, unidentified
  source 1..27: mol_type = other DNA
  misc_feature 1..27: note = Synthetic
atcgaattatctttgaagcctttgtag

SEQ ID NO: 15071 - DNA, 105 bp, unidentified; identical to SEQ ID NO: 7934
  source 1..105: mol_type = other DNA
  misc_feature 1..105: note = Synthetic

SEQ ID NO: 15072 - DNA, 105 bp, unidentified; identical to SEQ ID NO: 7935
  source 1..105: mol_type = other DNA
  misc_feature 1..105: note = Synthetic

SEQ ID NO: 15073 - DNA, 288 bp, unidentified
  misc_feature 1..288: note = Synthetic
  source 1..288: mol_type = other DNA
atcttaaagaaaaaatttttagagcgccaagatttagagaaacatagagctgcaaggcacataaaaaaaccattgaggttacagttgaagtcagtaggagagatgacatcattcaggagtataaattacatgggaaacacaaaagacgcagcagtattcccagttactgttcctatttttgcacggagaaataatattctttgtggttttttggttgccgccttactaattgtatgctatgtcatctttaaggaatttgctttgtcggctgatttctccgctgtgtaa

SEQ ID NO: 15074 - DNA, 15 bp, unidentified
  source 1..15: mol_type = other DNA
  misc_feature 1..15: note = Synthetic
atgtgccggacttga

SEQ ID NO: 15075 - DNA, 267 bp, unidentified
  source 1..267: mol_type = other DNA
  misc_feature 1..267: note = Synthetic
atgatattgtgtaccagaactccacctaaaagttttaaatctttgaaaaaagtttatacattctttaaatttttagcggataaaaaaatgacattatttaagagcattctatttaacttgcaagatctatccctgtatataacggaaacggataacgcaggattaaaagaatataaacgtatggaaaagtggaccaaaaagtcaattaatgtgatatgtgataaattaactacaaaattaaatagaatagtagacgacgatgaataa

SEQ ID NO: 15076 - DNA, 267 bp, unidentified
  misc_feature 1..267: note = Synthetic
  source 1..267: mol_type = other DNA
atgatattgtgtactaggacaccacctaagagtttcaaatctctaaaaaaggtttatacattctttaaatttttagcggataaaaaaatgacattatttaagagcattctatttaacttgcaagatctatccctggatataacggaaacggataacgcaggattaaaagaatataaacgtatggaaaagtggaccaaaaagtcaattaatgtgatatgtgataaattaactacaaaattaaatagaatagtagacgacgatgaataa

SEQ ID NO: 15077 - DNA, 30 bp, unidentified
  source 1..30: mol_type = other DNA
  misc_feature 1..30: note = Synthetic
atcaacatttgtgtgtatgtgcagagatga

SEQ ID NO: 15078 - DNA, 141 bp, unidentified
  misc_feature 1..141: note = Synthetic
  source 1..141: mol_type = other DNA
atcatgggagtgctggctgtgattataggatttgtgattttaatatttttaattaggctgattggggtcttatccagccttttcagacaaaaacgcaggccaatctacaaatcagacgtggaaatggctcatttccgttaa

SEQ ID NO: 15079 - DNA, 15 bp, unidentified
  source 1..15: mol_type = other DNA
  misc_feature 1..15: note = Synthetic
atgggtcccgtgtag

SEQ ID NO: 15080 - DNA, 15 bp, unidentified
  source 1..15: mol_type = other DNA
  misc_feature 1..15: note = Synthetic
atgggtcccgtgtag

SEQ ID NO: 15081 - DNA, 249 bp, unidentified
  misc_feature 1..249: note = Synthetic
  source 1..249: mol_type = other DNA
atgttaccctttgtccaagaacgaatagggttgttcatagtaaactttttcatttttaccgtagtatgtgctataacactcttggtgtgtatggctttccttacggctactagattatgtgtgcaatgtatgacaggcttcaataccctgttagttcagcccgcattatacttgtataatactggacgttcagtctatgtaaaattccaggatagtaaaccccctctaccacctgacgagtgggtttaa

SEQ ID NO: 15082 - DNA, 249 bp, unidentified; identical to SEQ ID NO: 15081
  misc_feature 1..249: note = Synthetic
  source 1..249: mol_type = other DNA

SEQ ID NO: 15083 - DNA, 12 bp, unidentified
  source 1..12: mol_type = other DNA
  misc_feature 1..12: note = Synthetic
gtgaatttatag

SEQ ID NO: 15084 - DNA, 507 bp, unidentified
  source 1..507: mol_type = other DNA
  misc_feature 1..507: note = Synthetic
atactattcatccaacttaaacaacgaaaaacatttttcattaagtttatcatgaatgcgtataataaagccgattcgttttctttagagtctgattctatcaaagatgttatacacgattatatttgttggctcagtatgactgatgaaatgagaccatctatcggaaacgtctttaaagcgatggaaacgtttaagatagacgcggttagatattacgatggtaacatatatgaattagctaaagatataaatgcgatgtcgtttgacggttttataagatctctacaaactatcgcttcaaagaaagataaactcactgtttatggaaccatgggactgctgtctattgtcgtagatattaacaaaggttgtgatatatccaatatcaagttcgctgccggaataatcattttaatggagtatatttttgatgacacggatatgtctcatcttaaagtagcactctatcgtagaatacagagacgtgatgatgtagatagataa

SEQ ID NO: 15085 - DNA, 33 bp, unidentified; identical to SEQ ID NO: 7953
  source 1..33: mol_type = other DNA
  misc_feature 1..33: note = Synthetic

SEQ ID NO: 15086 - DNA, 27 bp, unidentified
  source 1..27: mol_type = other DNA
  misc_feature 1..27: note = Synthetic
acgattatatttgttggctcagtatga

SEQ ID NO: 15087 - DNA, 39 bp, unidentified; identical to SEQ ID NO: 7955
  source 1..39: mol_type = other DNA
  misc_feature 1..39: note = Synthetic

SEQ ID NO: 15088 - DNA, 120 bp, unidentified; identical to SEQ ID NO: 7959
  misc_feature 1..120: note = Synthetic
  source 1..120: mol_type = other DNA

SEQ ID NO: 15089 - DNA, 120 bp, unidentified; identical to SEQ ID NO: 7959
  source 1..120: mol_type = other DNA
  misc_feature 1..120: note = Synthetic

SEQ ID NO: 15090 - DNA, 54 bp, unidentified; identical to SEQ ID NO: 7960
  misc_feature 1..54: note = Synthetic
  source 1..54: mol_type = other DNA

SEQ ID NO: 15091 - DNA, 33 bp, unidentified; identical to SEQ ID NO: 7961
  source 1..33: mol_type = other DNA
  misc_feature 1..33: note = Synthetic

SEQ ID NO: 15092 - DNA, 33 bp, unidentified; identical to SEQ ID NO: 7962
  misc_feature 1..33: note = Synthetic
  source 1..33: mol_type = other DNA

SEQ ID NO: 15093 - DNA, 786 bp, unidentified
  misc_feature 1..786: note = Synthetic
  source 1..786: mol_type = other DNA
aaggctttcacagcttgcgttctgattagcatagtcacacttagttcagctgcaatgattaatgttaatgtcactagaggtggtaaaattacattgaatgggacttatccacaaactacatggacaagatatcataaagatggatggaaaaatatctgtgaatggaatgttactgcatataaatgcttcaataatggaagcattactattactgccactgccaacattacttctggcacatacaaagctgaaagctataaaaatgaaatcaaaaaactaacctataaaaacaacaaaaccacatttgaagattctggaaattatgaacatcaaaaattatctttttatatgttgacaataattgaactgcctacaactaaggctcccaccacaaccagtacaactattaagaccactactcacactacagtgcaaaatactactttattgattgggtttttactgagagagaatgaaagtactactgaacagacagaggctacctcaagtgccttcagcagcactgcaaatttaacttcgcttgcttggactaatgaaaccggagtatcattgatgcatggccagccttactcaggtttggatattcaaattacttttctggttgtctgtgggatctttattcttgtggttcttctgtactttgtctgctgcaaagccagagagaaatctaggaggcccatctacaggccagtgattggggaacctcagccactccaagtggatggaggcttaaggaatcttctcttctcttttacagtatggtga

SEQ ID NO: 15094 - DNA, 1677 bp, unidentified
  source 1..1677: mol_type = other DNA
  misc_feature 1..1677: note = Synthetic
ttgtataaccgtgctacttacagcatggcctttttaagacaaacactgtggattttatggacatttaccatggtcattggccaggacaatgaaaagtgttcccaaaaaaccttaattggatatagacttaaaatgtctcgtgacggtgacattgcagttggagaaacagtggaattacgttgtagatctggatacactacttatgcccgcaatataacagcaacatgtttacaaggtgggacgtggtctgaaccaacggcaacatgtaacaaaaagtcctgtccaaacccaggtgaaatacaaaatggaaaggttatatttcatggtggacaagatgccttaaaatatggggcaaacatttcatatgtttgtaatgaaggatattttttggttggtcgagaatacgtgcgatattgtatgattggagcatctggccaaatggcgtggtcatcttctcctcctttttgtgaaaaagaaaagtgtcacagaccgaaaatcgaaaatggagattttaagcctgataaagattattatgagtataatgatgcagttcattttgaatgtaatgaaggatatactctagttggaccacattccattgcatgtgcagttaataacacgtggacatctaacatgccaacctgtgaactcgcaggctgtaaatttccatcggtgactcatggttatccaatccaaggtttttctcttacttataaacataagcaaagtgttacttttgcatgcaatgatggatttgttctcagaggatcccccacaattacgtgtaacgttactgaatgggacccaccacttcctaagtgtgttttggaagatatagatgatccaaacaattcaaatcctggacgtttgcatccaacacccaatgaaaaaccaaatggtaatgtctttcaacgctcaaactatacagaacctccaacaaagcctgaagacacccatacagcagctacttgtgataccaactgtgaacagccacctaaaatcctgccaacatccgaaggttttaatgagactaccacatctaatacaattacaaaacaattagaggatgagaaaactacatcccagccaaatacacatattacatctgccttaacatccatgaaagcgaaaggtaactttaccaacaagaccaataactctactgatctacatatagcgtctacacccacttcccaagatgatgctacgccttcaatacctagtgtacagacacccaattataatactaacgcaccgacacgtacactaacgtctctccatattgaagaaggcccatccaattctactacttcagaaaaggccactgcctctactctctcacacaactcacacaaaaatgacaccggaggcatatacacaacattaaacaaaacaacacagttgccatccactaataaacctacaaacagtcaagccaagagttccactaagccacgcgttgagacacacaataaaacaaccagtaatcctgccatttctttaacagattctgcagatgtgcctcagagaccgcgagaaccaacactccctcccattttcaggccaccggcgtctaaaaatcgctatctggaaaagcaactagttattggactactaaccgctgtcgccctaacgtgtggactgattaccttatttcactatctgttctttcgttag

SEQ ID NO: 15095 - DNA, 1677 bp, unidentified; identical to SEQ ID NO: 15094
  misc_feature 1..1677: note = Synthetic
  source 1..1677: mol_type = other DNA

SEQ ID NO: 15096 - DNA, 273 bp, unidentified
  source 1..273: mol_type = other DNA
  misc_feature 1..273: note = Synthetic
atgtcgttggatgaattggtagatgacggcgatgtatgtgcattgattaagaacatgagaatgacactgtctgacggtccattgctagatagattgaatcaaccagttaataatatagaagatgctaagcgaatgatcgctattagtgccaaagtggctagagacattggtgaacgttcagaaattagatgggaagattcgttcgccatactctttaggatgattgaaaagtattttgatgatctaatgattgatctatatggtgaaaaataa

SEQ ID NO: 15097 - DNA, 231 bp, unidentified
  misc_feature 1..231: note = Synthetic
  source 1..231: mol_type = other DNA
atgtttctaaaagggataatgtttctcgtagaagctaccagcttttggatgacgcaccacgatgcatataaaaacgtatatttgccaaaaagaggaagttatttaaggtcttatgtagaggagtacaacaaagacacacatgtgtgtcttataaacctgcaagggcttatgcatcacgattgtaatcaaaacactactgtcgtctgcgtaaaaaagatgtacaataactga

SEQ ID NO: 15098 - DNA, 90 bp, unidentified
  source 1..90: mol_type = other DNA
  misc_feature 1..90: note = Synthetic
aggatgactctcaaattattacactcacggcattcgttaaccaatgcctatggtgtcataaacgagtatccgtgtccgctattttattaa

SEQ ID NO: 15099 - DNA, 1011 bp, unidentified
  misc_feature 1..1011: note = Synthetic
  source 1..1011: mol_type = other DNA
atggagggggtagaaatggacaagccgctcctctacttcgacgagatcgcgggcgcgcgcgaatacgacgcggccttcgcggagaagcacgagccgcccaagatccccggccgcggacagatgaagctgctggtctgcgagctcgtgtttctcaaccggctgcacctgcacggcatgctcgacggcagcgtcatcgtgtacgtgggctccgcgcccggacggcacatctgctgcctgcactcgcacttccaggagctcggcgtctcgctcaagtgggtgctcatcgacgggcgcaagcacgacccctgtctctcggggctgcggaacgtgaccacggtgacgcgattcgcggacgaggcctacctccgcgagctgcgcggcgagctgcggcgctccaagatcgtgctcatttcggacatccgctccaaccgcgtggacaccgagcccaccaccgcggacctgctgcgcgactacgcgctccagaacaccatggtgagcgtgctcaagcccgtggcctccagtctgaagtggcgctgccccttcccggactcctgggagaaggacttctacgtgccctgcggcaaggagatgctgcagccgttcgcgccgccgttctccgcggagatgcggctgctcaccgtgtactcggagacgcgcccgaagctgcgtctgatcacgctcagcgacgcggtcaactatgaaaagaggatgttctacctcaatagcgtggtgcgccagcgcgtaattctgaactttgactaccccaaccaggagtacgacttctttcacatgttctgtctgctctcgtcggtggtgtgctcgtgcgaatttaaatcgcccaaagagaaggtgctgagcctgcagaaccgcttcttccgcttcctgcgcatcccgccctccatcacgctcgggctgcgccagcacgatgaaccgccacaacacgcggtacctggccaagatcctctgcctaaaggccgcggtaagaagcgaccccttcgcggtggtaagtag

SEQ ID NO: 15100 - DNA, 18 bp, unidentified
  source 1..18: mol_type = other DNA
  misc_feature 1..18: note = Synthetic
atgatcgatacagtttaa

SEQ ID NO: 15101 - DNA, 150 bp, unidentified
  source 1..150: mol_type = other DNA
  misc_feature 1..150: note = Synthetic
atggtcatcagtctagtcatattcgtgtctgtggcggccgccatcatcggtgtgctgtctaacgtattggagatgcttatgtatgtagaagaaaataatgaagaagatgctagaattaaggaggagcaagaactactgttgctatattga

SEQ ID NO: 15102 - DNA, 60 bp, unidentified
  source 1..60: mol_type = other DNA
  misc_feature 1..60: note = Synthetic
atgaagaagatgctagaattaaggaggagcaagaactactgttgctatattgatgcataa

SEQ ID NO: 15103 - DNA, 129 bp, unidentified; identical to SEQ ID NO: 7978
  source 1..129: mol_type = other DNA
  misc_feature 1..129: note = Synthetic

SEQ ID NO: 15104 - DNA, 2829 bp, unidentified
  misc_feature 1..2829: note = Synthetic
  source 1..2829: mol_type = other DNA
atggccaccccatcgatgctgccccagtgggcgtacatgcacatcgccggacaggacgcttcggagtacctgagtccgggtctggtgcagttcgcccgcgccacagacacctacttcagtctggggaacaagtttaggaaccccacggtggcgcccacgcacgatgtgaccaccgaccgcagccagcggctgacgctgcgcttcgtgcccgtggaccgcgaggacaacacctactcgtacaaagtgcgctacacgctggccgtgggcgacaaccgcgtgctggacatggccagcacctactttgacatccgcggcgtgctggatcggggccctagcttcaaaccctactccggcaccgcctacaacagcctggctcccaagggagcgcccaattccagccagtgggagcaaaaaaaggcaggcaatggtgacactatggaaacacacacatttggtgtggccccaatgggcggtgagaatattacaatcgacggattacaaattggaactgacgctacagctgatcaggataaaccaatttatgctgacaaaacattccagcctgaacctcaagtaggagaagaaaattggcaagaaactgaaagcttttatggcggtagggctcttaaaaaagacacaagcatgaaaccttgctatggctcctatgctagacccaccaatgtaaagggaggtcaagctaaacttaaagttggagctgatggagttcctaccaaagaatttgacatagacctggctttctttgatactcccggtggcacagtgaatggacaagatgagtataaagcagacattgtcatgtataccgaaaacacgtatctggaaactccagacacgcatgtggtatacaaaccaggcaaggatgatgcaagttctgaaattaacctggttcagcagtccatgcccaatagacccaactatattgggttcagagacaactttattgggctcatgtattacaacagtactggcaatatgggggtgctggctggtcaggcctcacagctgaatgctgtggtcgacttgcaagacagaaacaccgagctgtcataccagctcttgcttgactctttgggtgacagaacccggtatttcagtatgtggaatcaggcggtggacagttatgatcctgatgtgcgcattattgaaaaccatggtgtggaagacgaacttcccaactattgcttccccctggatgggtctggcactaatgccgcttaccaaggtgtgaaagtaaaaaatggtaacgatggtgatgttgagagcgaatgggaaaatgatgatactgtcgcagctcgaaatcaattatgcaagggcaacatttttgccatggaaattaacctccaagccaacctgtggagaagtttcctctactcgaacgtggccctgtacctgcccgactcttacaagtacacgccagccaacatcaccctgcccaccaacaccaacacttatgattacatgaacgggagagtggtgcctccctcgctggtggacgcctacatcaacatcggggcgcgctggtcgctggaccccatggacaacgtcaatcccttcaaccaccaccgcaacgcgggcctgcgctaccgctccatgctcctgggcaacgggcgctacgtgcccttccacatccaggtgccccagaaatttttcgccatcaagagcctcctgctcctgcccgggtcctacacctacgagtggaacttccgcaaggacgtcaacatgatcctgcagagctccctcggcaacgacctgcgcacggacggggcctccatctccttcaccagcatcaacctctacgccaccttcttccccatggcgcacaacacggcctccacgctcgaggccatgctgcgcaacgacaccaacgaccagtccttcaacgactacctctcggcggccaacatgctctaccccatcccggccaacgccaccaacgtgcccatctccatcccctcgcgcaactgggccgccttccgcggctggtccttcacgcgcctcaagaccaaggagacgccctcgctgggctccgggttcgacccctacttcgtctactcgggctccatcccctacctcgacggcaccttctacctcaaccacaccttcaagaaggtctccatcaccttcgactcctccgtcagctggcccggcaacgaccggctcctgacgcccaacgagttcgaaatcaagcgcaccgtcgacggcgagggatacaacgtggcccagtgcaacatgaccaaggactggttcctggtccagatgctggcccactacaacatcggctaccagggcttctacgtgcccgagggctacaaggaccgcatgtactccttcttccgcaacttccagcccatgagccgccaggtggtggacgaggtcaactacaaggactaccaggccgtcaccctggcctaccagcacaacaactcgggcttcgtcggctacctcgcgcccaccatgcgccagggccagccctaccccgccaactacccgtacccgctcatcggcaagagcgccgtcaccagcgtcacccagaaaaagttcctctgcgacagggtcatgtggcgcatccccttctccagcaacttcatgtccatgggcgcgctcaccgacctcggccagaacatgctctatgccaactccgcccacgcgctagacatgaatttcgaagtcgaccccatggatgagtccacccttctctatgttgtcttcgaagtcttcgacgtcgtccgagtgcaccagccccaccgcggcgtcatcgaggccgtctacctgcgcacccccttctcggccggtaacgccaccacctaa

SEQ ID NO: 15105 - DNA, 57 bp, unidentified; identical to SEQ ID NO: 7985
  misc_feature 1..57: note = Synthetic
  source 1..57: mol_type = other DNA

SEQ ID NO: 15106 - DNA, 57 bp, unidentified; identical to SEQ ID NO: 7986
  misc_feature 1..57: note = Synthetic
  source 1..57: mol_type = other DNA

SEQ ID NO: 15107 - DNA, 57 bp, unidentified; identical to SEQ ID NO: 7986
  source 1..57: mol_type = other DNA
  misc_feature 1..57: note = Synthetic

SEQ ID NO: 15108 - DNA, 513 bp, unidentified
  source 1..513: mol_type = other DNA
  misc_feature 1..513: note = Synthetic
atgcccaaggccagacggcagcgaactcgtcgcacacgcagcaacagaccaccaacaccatggcccactttccaggtttcggacagagcctcctctatggatacccagtctacgtgtttggcgattgtgttcaagccgattggtgtcccgtttcaggtgggctttgttccacccgcctgcaccggcatgcccttctcgccacctgcccggagcaccagctcacctgggaccccatcgatggacgcgttgtcggctctcctctccaataccttatccctcggctcccctccttccccacccagagaacctccaagaccctcaaggtcctcactccccctaccactcctgtctcccccaagattccacccgcctttttccaatccatgcgtaaactctccccctaccggaacgggtgcctatacccaactctcggagaccagctcccctcccttgccttccccgaccccggtctccggccccaaaacatctacaccacctggggaagaaccgtag

SEQ ID NO: 15109 - DNA, 108 bp, unidentified; identical to SEQ ID NO: 7988
  source 1..108: mol_type = other DNA
  misc_feature 1..108: note = Synthetic

SEQ ID NO: 15110 - DNA, 171 bp, unidentified
  misc_feature 1..171: note = Synthetic
  source 1..171: mol_type = other DNA
acgcagcaacagaccaccaacaccatggcgccctccggcgaccatcccgtacatcctctccgaccgaccctgatcctaagggtcgcccccgtgttgtctttctcaggcctcctccagaacacgatacaccagtcaccaccacctcaggatcccccaatggcagccttctga

SEQ ID NO: 15111 - DNA, 72 bp, unidentified; identical to SEQ ID NO: 7990
  source 1..72: mol_type = other DNA
  misc_feature 1..72: note = Synthetic

SEQ ID NO: 15112 - DNA, 42 bp, unidentified; identical to SEQ ID NO: 7996
  source 1..42: mol_type = other DNA
  misc_feature 1..42: note = Synthetic

SEQ ID NO: 15113 - DNA, 78 bp, unidentified; identical to SEQ ID NO: 7998
  source 1..78: mol_type = other DNA
  misc_feature 1..78: note = Synthetic

SEQ ID NO: 15114 - DNA, 282 bp, unidentified
  source 1..282: mol_type = other DNA
  misc_feature 1..282: note = Synthetic
atggacgtaatgggtgcaattaacaactactttaacggtgcattaattggcggtattatattgttagcagcgtcttgtatttttgcatttgttgatttttcaaaaaataagcccacggttactatttggagagcgttaagcggtatagcctttgttttagggatagttataacaataggcatgctaatttactctatgtggggaagatattgtactccgagcaaagtagttattgacaatggaaggtataattctagccaaattgaacttaacggacaataa

SEQ ID NO: 15115 - DNA, 171 bp, unidentified
  source 1..171: mol_type = other DNA
  misc_feature 1..171: note = Synthetic
atagatataacaacgtctggtaaaagtcactgcccgatgtttactgcaactgttataataagcggaataaaatttaaaccggcaataggaaatacaaaaagggaagcaaaatataacgcgtctaaaataactatggacgaaatattggattccgtaattataaagttttaa

SEQ ID NO: 15116 - DNA, 897 bp, unidentified
  misc_feature 1..897: note = Synthetic
  source 1..897: mol_type = other DNA
atccaagccgtcacaccacccagaccagccatgaacagctctggtcaagaggatatcatatccatccccaaatccgccttcctgagcatgctacaaagcagcatcgatggaatgaagaccacagcggcaaaaatgtcacatacactttcagggccaggcctaatggggtgtgggggccagatgttccccaccgaccatcacctaccttcgtatgtttcaaacccagcgccaccatacggctacgcttacaagaacccatacgatccatggtattactcgccacagctgcctggatataggacggggaagcgcaagcgcggcgcagaggacgacgaaggacacctctttccaggagaggagccggcgtatcacaaggatatcttgtccatgtcaaagaacatagcggaaatacagtctgaactcaaagagatgaaactgaacggttggcacgcagggccaccgccgtcctcctctgcagcagcagccgcagtagatccacactacaggccccacgccaattcagcggccccgtgtcaattcccgacaatgaaggagcacggaggaacctacgtacacccacccatttacgtgcaggcgccacacggtcagttccagcaagcggcgcccatcctttttgctcagccacatgtgagccacccgccagtctctacaggactcgcggtagttggcgcaccacccgctgaacccacccccgcctccagcacgcagagcatccaacaacaggcaccggagaccacgcatacaccatgcgcggcggtggagaaagacgctcctacgccgaaccctacatcgaaccgcgttgaagccagcagtcgctctagtccaaaatctaaaattcgcaagatgttctgcgaggagctcctgaacaagcagtag

SEQ ID NO: 15117 - DNA, 897 bp, unidentified
  source 1..897: mol_type = other DNA
  misc_feature 1..897: note = Synthetic
atccaagccgtcacaccacccagaccagccatgaacagctctggtcaagaggatatcatatccatccccaaatccgccttcctgagcatgctacaaagcagcatcgatggaatgaagaccacagcggcaaaaatgtcacatacactttcagggccaggcctaatggggtgtgggggccagatgttccccaccgaccatcacctaccttcgtatgtttcaaacccagcgccaccatacggctacgcttacaagaacccatacgatccatggtattactcgccacagctgcctggatataggacggggaagcgcaagcgcggcgcagaggacgacgaaggacacctctttccaggagaggagccggcgtatcacaaggatatcttgtccatgtcaaagaacatagcggaaatacagtctgaactcaaagagatgaaactgaacggttggcacgcagggccaccgccgtcctcctctgcagcagcagccgcagtagatccacactacaggccccacgccaattcagcggccccgtgtcaattcccgacaatgaaggagcacggaggaacctacgtacacccacccatttacgtgcaggcgccacacggtcagttccagcaagcggcgcccatcctttttgctcagccacatgtgagccacccgccagtctctacaggactcgcggtagttggcgcaccacccgctgaacccacccccgcctccagcacgcagagtatccaacaacaggcaccggagaccacgcatacaccatgcgcggcggtggagaaagacgctcctacgccgaaccctacatcgaaccgcgttgaagccagcagtcgctctagtccaaaatctaaaattcgcaagatgttctgcgaggagctcctgaacaagcagtag

SEQ ID NO: 15118 - DNA, 450 bp, unidentified
  misc_feature 1..450: note = Synthetic
  source 1..450: mol_type = other DNA
atggatcctagtataattgattgtataaacagacacatcaacatgcgcatacaacgcagttatagttctaatataattgccatattggatagattcctaatgatgaacaaggacgaactaaataatacacagtgtcatataattaaagaatttatgacatacgaacaaatggctattgattactatggtggatatgtaaacgctattctgtatcaaattcgtaaaagacctaatcaacatcacacaatcgatctgtttaaaagaataaaaagaacccggtatgacacttttaaagtgaatcccgtagaattcgtcaaaaaagttatcggatttgtatctatcttgaacaaatataaaccaatttatagttacgtcctgtacgagaacgtcctttacgatgagctcaaatgtttcattgactacgtggaaactaagtatttccaaaattga

SEQ ID NO: 15119 - DNA, 222 bp, unidentified
  misc_feature 1..222: note = Synthetic
  source 1..222: mol_type = other DNA
atgtctggtaattcatatagagatcgaaaaaagagatctgttgaagcatttcttgattggatggacacattcggattgcgagactccgttccggatagacgcaaattagacgatgtagcggatagtttcaatttggctatgagatacgtattagataaatggaatactaattatacaccttataataggtgtaaatatagaaattacataaaaaaaatgtaa

SEQ ID NO: 15120 - DNA, 1056 bp, unidentified
  misc_feature 1..1056: note = Synthetic
  source 1..1056: mol_type = other DNA
ataaaaaacttaggagctaaaggttactcagtcatatacagcatgactgagatattcaaccttgatgagagctcatggtcagtcaaagggatactagatccgttaacacctgatacctatcctgatggtcgactagtgcctaaagttcgagttatcgatccgggtctaggagatcgcaagagtggggggtatatgtacctacttcttcatggtgtcatagaagatagtgagactataattagcccgaaaggaagagcatttggtgcattcccattaggagtgggtcaatcaactgaaaacccggaagacttgtttaaggaaatattaactctcaacatcgtgactcgtaggactgctggatttaatgagaaattggtttattataataccacacctctacatttactgaccccctggaaaaaagtgttggcatatggaggcatttttaatgctaatcaggtctgcagtgatacaagttccataccaatagacattccacaaaaatttaggccagtatatttgactgttacaaaattatctgatgatggctattatcagatcccaaagatgattcaagatttcaaatcgtcaaattctgttgcattcaacatccttgtgcatctgtcaatgggcataaatttacttgaccaatccaaggaccctagattaagaaatgctgcagaaactgtgatcacatttatgattcatattggaaactttaaacggaagagtaataagtcttactcacctgaatattgcaagaggaaaataatgaggctgggtttaatattctcattaggtgcaattggtggcacaagcttgcatattagatgtacaggtaagatgagcaaacgactacaggcttatttaggattcaaaaggactttatgttaccctttgatgtatgttaatgaagggctgaacaagaccctgtggagaagtgaatgcagaatagagaaggttcaagcagtcttacagccatcagtcccgaatgaatttaagatatatgatgatgttattattgataataccaatggtctcttcaagattaaatag

SEQ ID NO: 15121 - DNA, 135 bp, unidentified; identical to SEQ ID NO: 8008
  misc_feature 1..135: note = Synthetic
  source 1..135: mol_type = other DNA

SEQ ID NO: 15122 - DNA, 222 bp, unidentified
  source 1..222: mol_type = other DNA
  misc_feature 1..222: note = Synthetic
atgtctggtaattcatatagagatcgaaaaaagagatcggtcgaagcatttcttgattggatggacacattcggattgcgagactccgttccggatagacgcaaattagacgatgtagcggatagtttcaatttggctatgagatacgtattagataaatggaatactaattatacaccttataataggtgtaaatctagaaattacataaaaaaaatgtaa

SEQ ID NO: 15123 - DNA, 162 bp, unidentified
  source 1..162: mol_type = other DNA
  misc_feature 1..162: note = Synthetic
atggacacattcggattacgagactccgttccagatagacgcaaattagacgatgtagcggatagtttcaatttggctatgcgatacgtattagataaatggaatactaattatacaccttataataggtgtaaatctagaaattacataaaaaaaatgtaa

SEQ ID NO: 15124 - DNA, 222 bp, unidentified
  source 1..222: mol_type = other DNA
  misc_feature 1..222: note = Synthetic
atgtctggtaattcatatagagatcgaaaaaagagatctgtcgaagcattttttgattggatggacatattcggattgcgagactccgttccagatagacgcaaattagacgatgtagcggatagtttcaatttggctatgagatacgtattagataaatggaatactaattatacacattataataggtgtaaatctagaaattacataaaaaaaatgtaa

SEQ ID NO: 15125 - DNA, 6744 bp, unidentified
  source 1..6744: mol_type = other DNA
  misc_feature 1..6744: note = Synthetic
atggcggcgtctaaggtatacagagtgtgcgagcagactctactagcaggcgctgttcggatgatggacaaattcttgcaaaagaaaacagtttttgtgccacagcttgacaaacaggtaaggttgactggtcttcacaattatgacaacacatgctggctaaatgccctgactcagctgacacagattcttgggattcggctttttgacgagcattttggaaatagaggtttgttcactcggaaaacaattgattgggtgagtgaccaaactggtattaaagatttgaagtcaggggcacctccacttgtggtggtgtacaaattatggcaacatggacatttggatgttggcaccatggaaaaacccaggtcaattacactgtggtccgggccaaaggtctgcctttctgatttttgggcctgtgtttcagccaaaccagggcacgcagtgttttaccttcttacaagtgagggttggatttgtgttgatgacaaaaagatatacccagagacacccaaaacagaagatgtactagttttcgcgccctatgactttgagtcattgggcaaagaccctcctaagttacatcagaggtatgagaaggcgtttgaacgccttagcggagctggtacatcgactccaacgactggcaaccagaacatgtcaggaaacagtggttccattgtacagaatttttacatgcaacaataccagaattcaattgatgctgacctcggagacaatgtaattagtcctgaaggccaagggagcaacactagtagttcgacttcgtccagccagtcatctggtctgggcggttggttctctagtttgcttaaccttgggacaaagctactagctgacaaaaagacagaagagacaactaacattgaagatagaattgagacaacggtggttggagtaaccatcataaattcacaagggtcagttggaaccacctactgttactcaaggccagacagcaaggcaccctccacggtgtctgacccagtcaccagactcggacccacgctttccagacattacacattcaaagtgggtgagtggcctcattcacaatcacacggccacgcctggatttgtccactgcctggagacaagctgaaaaagatgggcagcttccacgaggttgtcaagtctcaccacctggtcaagaatggctgggatgtggttgtacaagtaaatgcctcctttgcacactccggagcgctgtgcgttgctgcggtgcccgagtataaacacactcatgagaaggcattaaagtggtctgagcttgaggaaccagcctacacgtaccagcagctttctgtgtttccccatcagctgttaaatttgagaacaaattcatctgtgcatttggttatgccctacattggacctggcccaacaacaaatttgaccctccacaatccgtggacaatagttatattaatactgtctgagttgacagggcctgggcaaactgtgcctgtgaccatgtcagtggcacccattgatgctatggtcaacgggcctcttccaaatccagaggcgccaattcgagtggtgtctgttccagaatcagattcgttcatgtcttcagtgccagacaattcaaccccactttatccaaaggtggtggtgccaccacggcaggttcctggccggtttaccaactttattgatgtggcaaaacaaacatactcattctgttcaatttctggtaaaccctattttgaggtaaccaacacctctggggatgaaccactatttcaaatggatgtgtcgctcagtgcagctgaattgcatggcacttatgtggctagtttgtcatccttttttgcacagtacagaggatcattaaattttaactttattttcactggagctgcagctaccaaggcaaaatttttggttgcttttgtgcctccccacactgctgcgccaaaaacgcgcgacgaagctatggcatgcattcatgctgtgtgggatgttggcctcaattctgcattctcatttaatgtgccttattcttccccatctgacttcatggctgtttattctgcggatgcaacggttgtgaatgtttctggttggttacaagtttatgcattgacagctttgacttcaactgacattgctgtgaacagcaagggccgcgtacttgttgctgtttccgccgggcctgacttctcgctccgacatcctgttgacttgcctgacaagcaggtcacaaatgtgggagaggatggcgagcccggtgagacagaaccacggcacgctttgtcccctgtggacatgcatgtccacacagacgtcagttttctgcttgacagattctttgatgttgagacaattgaactttcaaatttaacaggctccccaactactcatcttttggatccttttggttccactgcccagtttgcttgggctcgacttctcgacacttgtacatacttcttctccgacttggagttgtctattcagtttaagtttaccaccaccccatcttcagttggagagggctttgtgtgggtcaaatggttcccggttggagcaccaaccaagaccactgatgcctggcagctaaaaggtggaggcaactccgtcaggattcaaaaattggccgtagcagggctttcccccactgttgtctttaaaattgctggctcccgctcgcaagcttgcgggttcaacgtgccatatacatctatgtggcgcgttgtgccagtcttttacaatggctggggagcaccaactaaagaggagtccacttacaattggctgcccggtgctcactttggctctatattgctgacatctgatgcacatgacaaaggagggtgttacttgcggtaccgctttccgcgagcaagcatgtattgccctcggcccattccaccggctttcactcgccctgctgacaaaactaggcacaagttccccacaaatattaacaaacagtgtactaattatgctctcttgaaattggctggagatgttgagagcaacccaggtcccaccattttttcaaaagcatcagccgatttgaatgcattgtcaacgtcactgggtgagctgaccggcatgctgaaggatttgaaagctaaagcagagacatattctcctttttacaagatggcaaaaatgctttttaaacttgcaacactggctgtgacggcaatgcggaccaaggacccggtggttgtggtcatgctgattgctgattttggattagaggtgtttgacacaggttttttcttttcctattttcaagaaaagctgcagccatacatgaagaccattccaggcaagatatcagaattggttactgatgcagccacggctgctgcccaaattccaaaaggtgtttactcttttgtgtcttctttctttgaaacccctgaaggagtggttgaaaaacaggtctctctccgaacggtgaacgacatcttcactctgcttaagaattcagattggtttattaagacacttgttgctcttaaaaagtggttaacgtcttggtttgcgcaagagcagcaagcggatgatgcactttattcagaattagaaaagtaccctctttacaaattgaaattgaaagaacctgatacgcaggaagaggcgcgccagtggttcaaggacatgcaacagcgtgctctcgctgtgaaagataaaggcctcttttccctgctgcaaatcccactagtcaacttgcccacaagcaggccagagcctgttgtgtgtatccttcggggtgcatcaggacagggaaaatcttatttggcaaatttgatggctcaggcaatttctcttcttttagtgggtaaacagggtagtgtgtggagttgtcccccagaccctacatattttgatggatacaatggacaagctgtggttatcatggatgatctaggccagaaccccaatggagcagattttaagtacttttgtcagatggtgtcaacaacagcttttgtgccccccatggctcacttggatgataagggcattccattcacttcccctgttgttatttgtaccacaaacctgcattcatcttttacacccattactgtttcttgtccagaagctctcaagcggaggtttcggtttgatgtgacggtatctgcaaagcctggctttgtacgtactgttggttcgagccaacttttgaacctcccactggctttgaaacctgctggtcttccacctcatcctatttttgagaacgacatgcccattctgaatggacaggctgttaaattggctttgtctggtggagaagttacagcttttgagcttatagaaatgatcctgtcagaagtccaaaacagacaagacacacacaaaatgcccatttttaaacaatcgtggtctgacttgtttaagaaatgttcaactgatgaggagcaaaaaatgttacaatttttgattgacaataaggattcagaaattttgagggcttttgtgtcggaacgctcaattttgttgcatgaagagtatcttaagtgggagtcatacatgactaggagagctaagtttcatcgcttggctgctgattttgctatgtttctttcaattcttacttcattgattgttattttttgtctggtgtactcaatgtatcagatttttaaaaccccagatgaacattcggcttatgatccagcaacaaaacccaaacccaaaacacaggagattaagactttgaaaataaggacagagactggagttccagcaactgatttgcaacaatctattatgaagaatgttcagccaattgagctttattgtgatggtaatttggttactgattgttctgctttgggtgtttatgataactcctatttggttcccttgcatttgtttgagtttgattttgacaccattgtgcttggcggtcgccagtacaagaaagctgattgtgaaaaagtggaatttgaacttgaaattaatggagatatggtgtcatcggacgcgtgcttgctccgggttccaaccggaccaaaagtgagaaatattgttcatcttttcacaaatgaaattgagttaaaaaagatgacccaaattacaggaattatgaattctccacaccaagcacgcactgtgttttttggcagttttttgacagtaaaaaaatctattttgacatcagatgggactgttatgcctaatgtcttgtcttacgcagcccagacctcgcgggggtattgtggcgcagcaattgtggcaggctcacctgcccgcatcattggcattcattctgctggtactgggtctgtagccttttgctccctggtgtccagagatgcgctagagcgcactctccctcagaaacagggcaacgttgttcgtcttgatgatgatgtgagggtgtctgtcccgcgccgaaccaaattagtgaagtcattggcataccctgtttttaaacctgactatggacctgctcctttgtcccagtttgacaagcgcttggctgatggtgtaaagttggatgaagtggtttttgccaagcatactggagacaaggacatttccgcggaagaccagaaatggcttctgcgcgcagctcatgtttatgctcaacgggtctttgcccgtattggatttgacaaccaggctttgactgagcaggaagccatttgtggcattcccggccttgacaagatggaacaggacaccgctcccgggttgccctatgctcaacaaaacaaaagaaggaaagacatatgtgattttgacaagggccagctaaaaggagccgcaaagcttcaaaaagatagatttatggcaggagattattctgatttggtttaccagtctttcctgaaagatgagattcgcccacttgaaaaggtgagagcaggcaaaacccgtttgattgatgtgccaccgatgccccatgtggtggttggtaggcagcttttgggccggtttgtggcaaagtttcatgaggcaaatggatttgagactggttctgctattggatgtgacccagatgtggattggactcggtttggtcttgagctggaacgttataggtatgtgtatgcctgtgattactcccggttcgacgcgaaccatgcagctgatgcaatgagagttgtcctgaattacttcttttctgaggaccacgggtttgaccctggggtccctgctttcattgagtcgctcgtcgactcggtgcatgcttatgaagaaaagaggtttaacatttatggaggtttgccatctgggtgttcctgtacatccattttaaatactgttttaaacaatgtttacattcttgcagctatgatgaaggcttttgagaactttgagccggatgatatccaggtgatttgctatggggatgattgcctcattgcttctgaccttgagattgactttcaaaagttggtgcctgtgttttccagttttggacaggtaataacaacagctgacaagactgatttttttaaattgacaacgctttcggaggtcaccttccttaagcgggcttttgttcctgacggggccttttacaaaccagtgatggatgtgaagacccttgaagcaatccttagctttgtgcgcccaggcacacaggctgaaaagctcctgtctgttgcgcagttggctggccactgcgaaccagaacagtatgagcgcctgtttgagccttttgctgggatgtattacgtccctacttggcgtgatttgcgcctgcagtggctaatgaagcttggatgctaa

SEQ ID NO: 15126 - DNA, 30 bp, unidentified; identical to SEQ ID NO: 8016
  source 1..30: mol_type = other DNA
  misc_feature 1..30: note = Synthetic

SEQ ID NO: 15127 - DNA, 45 bp, unidentified; identical to SEQ ID NO: 8017
  misc_feature 1..45: note = Synthetic
  source 1..45: mol_type = other DNA

SEQ ID NO: 15128 - DNA, 105 bp, unidentified; identical to SEQ ID NO: 8018
  misc_feature 1..105: note = Synthetic
  source 1..105: mol_type = other DNA

SEQ ID NO: 15129 - DNA, 33 bp, unidentified; identical to SEQ ID NO: 8019
  misc_feature 1..33: note = Synthetic
  source 1..33: mol_type = other DNA

SEQ ID NO: 15130 - DNA, 1143 bp, unidentified
  source 1..1143: mol_type = other DNA
  misc_feature 1..1143: note = Synthetic
atgctggcgctgttcgagttcctgcggtccgtggaggactgctaccggcgcaccatcttcaacttccacatcgcgcacagcgccgaggcgggcgatgtctacggcgtgctgcgcgaccgcatcctcgcggccacgcgcttcgaggaggtcgcgccgccggggctcgcggacgcgctggccaaggtggtctactgcgacataagcaccaccaagcacctagtcaaccacgcggccttcgcggcgcgcgcgcggtcggcgcggcgcggaggcagcctcgcacagttcttcgacgtacacgtgggcgaggacgcggagagccgccgcaccgcggagatcttcgaccgcgagcgctcctcgctggtctcgtacgtgaagaccacggccaagcgctgcaagatcgactacggcgagatcaagcgcaccatccacggcgggcggcagacctacttctcggggcggcgctcggacgacttcctgagcaccaccgtgcgcgcggacccgagcaagccctggatcaagtccatctccaagcagctgcgcgtggacatcctgcaccacgcgatctgcacgcgcggcaagagctccatcctgcagaccatcgaggtcgtgctcacgaaccgcacctgcgtgaagatattcaaggactcgaccatgcacataatcctctccaaagacgaccgcgagcgcgggctcgcggacctcgcggacaagctcttcgggacctacgcgaccaccttccgcgtcatcgcggccatcaccggcaacgcctgcttcgcggcggtggcggacgcggccgcgcgcgtggtcgcgctcccggacgcggacgcgaagctggaggcggtgcgcgggctcgcggactgctacggcgtgcgcaacttcaaaatcggcatgttcaacctcaccttcacgggcgccatcgagcacacggtcttcccctcgctgatccccgcggagagcaagatcaagttcttcaagggcaagaagcttaacatcgtcgcggtgcgctccaccgaggagggccgcgagtgcgtggagcaggcgcaggcgctgctcgcggccatgcgcgagcgctccgcgcggctcgcggccgcggacgtggccaccgcgagcgtggacttcctcaaggagctgctgggggcatag

SEQ ID NO: 15131 - DNA, 687 bp, unidentified
  misc_feature 1..687: note = Synthetic
  source 1..687: mol_type = other DNA
atggcacccaaaaagaagctgcagctgccgccgccgccacccacggacgaggaggaatactgggacagtcaggcagaggaggttttggacgaggaggaggagatgatggaagactgggacagcctagacgaagcttccgaggccgaagaggtgtcagacgaaacaccgtcaccctcggtcgcattcccctcgccggcgccccagaaattggcaaccgttcccagcatcgctacaacctccgctcctcaggcgccgccggcactgcctgttcgccgacccaaccgtagatgggacaccactggaaccagggccgcccctactgcaccggcggcagcggcagcggcagcaacagcagcggtcacacagaagcaaaggcgaccggatagcaagactctgacaaagcccaagaaatccacagcggcggcagcagcaggaggaggagcgctgcgtctggcgcccaacgaacccgtatcgacccgcgagcttagaaataggatttttcccactctgtatgctatatttcaacaaagcaggggccaagaacaagagctgaaaataaaaaacaggtctctgcgctccctcacccgcagctgcctgtatcacaaaagcgaagatcagcttcggcgcacgctggaagacgcggaggctctcttcagcaaatactgcgcgctgactcttaaggactag

SEQ ID NO: 15132 - DNA, 588 bp, unidentified
  source 1..588: mol_type = other DNA
  misc_feature 1..588: note = Synthetic
atggcacccaaaaagaagctgcagctgccgccgccgccacccacggacgaggaggaatactgggacagtcaggcagaggaggttttggacgaggaggaggagatgatggaagactgggacagcctagacgaagcttccgaggccgaagaggtgtcagacgaaacaccgtcaccctcggtcgcattcccctcgccggcgccccagaaattggcaaccgttcccagcatcgctacaacctccgctcctcaggcgccgccggcactgcctgttcgccgacccaaccgtagatgggacaccactggaaccagggccggtaagtctaagcagccgccgccgttagcccaagagcaacaacagcgccaaggctaccgctcgtggcgcgggcacaagaacgccatagttgcttgcttgcaagactgtgggggcaacatctccttcgcccgccgctttcttctctaccatcacggcgtggccttcccccgtaacatcctgcattactaccgtcatctctacagcccctactgcaccggcggcagcggcagcggcagcaacagcagcggtcacacagaagcaaaggcgaccggatag

SEQ ID NO: 15133 - DNA, 384 bp, unidentified
  misc_feature 1..384: note = Synthetic
  source 1..384: mol_type = other DNA
ctggctcccgttgttgacaaccaagggcagcggctcagcgtcacctattctcaggacaccatatccatcctgcttggtccattcacgtatgtgatcgcggacctgcttcagatggagctcattagtcactccttcgtatcctccagcttgcaggacatcgcggcctatttatatcagactagcagactctttgtgtatataaccgacgtgggacagaaatactgtctagttacaccacccttcgagaatgtccctggaaagggccctggcgagactgactggagtgccaatgagtactcatgccccgaagactcgcgagtcagaagaggcctgtcccgtatacccccaccctgtggtgccccgccttgtcctggaagtgcatag

SEQ ID NO: 15134 - DNA, 384 bp, unidentified; identical to SEQ ID NO: 15133
  source 1..384: mol_type = other DNA
  misc_feature 1..384: note = Synthetic

SEQ ID NO: 15135 - DNA, 243 bp, unidentified
  misc_feature 1..243: note = Synthetic
  source 1..243: mol_type = other DNA
attaacgttaactctttagcgttaaaaaattcccaagcggaacttacgtctaattgtactagaactacgtccgccgttggtgacgtacatccaggagaacctgtagtaaaagataaaataaaactgcctacctggttgggcgcggccataacactggttgtaatatctgttattttctattttatatctatttattcgcgtcctaaaattaaaacaaatgatataaatgttcgtagacgataa

SEQ ID NO: 15136 - DNA, 246 bp, unidentified
  misc_feature 1..246: note = Synthetic
  source 1..246: mol_type = other DNA
acgattaatgttaactctttagcgttaaaaaattcccaagcagaacttacgtctaattgtactagaactacgtccgccgttggtgacgtacatccaggagaacctatagtaaaagataaaataaaactgcctacctggttgggcgcggccataacactggttgtaatatctgttattttctattttatatctatttattcacgtcctaaaattaaaacaaatgatataaatgttcgtagacgataa

SEQ ID NO: 15137 - DNA, 6330 bp, unidentified
  misc_feature 1..6330: note = Synthetic
  source 1..6330: mol_type = other DNA
atggaagtccacgattttgagaccgacgagttcaatgatttcaatgaagatgactatgccacaagagaattcctgaatcccgatgagcgcatgacgtacttgaatcatgctgattacaatttgaattctcctctaattagtgatgatattgacaatttgatcaggaaattcaattctcttccgattccctcgatgtgggatagtaagaactgggatggagttcttgagatgttaacatcatgtcaagccaatcccatctcaacatctcagatgcataaatggatgggaagttggttaatgtctgataatcatgatgccagtcaagggtatagttttttacatgaagtggacaaagaggcagaaataacatttgacgtggtggagaccttcatccgcggctggggcaacaaaccaattgaatacatcaaaaaggaaagatggactgactcattcaaaattctcgcttatttgtgtcaaaagtttttggacttacacaagttgacattaatcttaaatgctgtctctgaggtggaattgctcaacttggcgaggactttcaaaggcaaagtcagaagaagttctcatggaacgaacatatgcaggattagggttcccagcttgggtcctacttttatttcagaaggatgggcttacttcaagaaacttgatattctaatggaccgaaactttctgttaatggtcaaagatgtgattatagggaggatgcaaacggtgctatccatggtatgtagaatagacaacctgttctcagagcaagacatcttctcccttctaaatatctacagaattggagataaaattgtggagaggcagggaaatttttcttatgacttgattaaaatggtggaaccgatatgcaacttgaagctgatgaaattagcaagagaatcaaggcctttagtcccacaattccctcattttgaaaatcatatcaagacttctgttgatgaaggggcaaaaattgaccgaggtataagattcctccatgatcagataatgagtgtgaaaacagtggatctcacactggtgatttatggatcgttcagacattggggtcatccttttatagattattacactggactagaaaaattacattcccaagtaaccatgaagaaagatattgatgtgtcatatgcaaaagcacttgcaagtgatttagctcggattgttctatttcaacagttcaatgatcataaaaagtggttcgtgaatggagacttgctccctcatgatcatccctttaaaagtcatgttaaagaaaatacatggcccacagctgctcaagttcaagattttggagataaatggcatgaacttccgctgattaaatgttttgaaatacccgacttactagacccatcgataatatactctgacaaaagtcattcaatgaataggtcagaggtgttgaaacatgtccgaatgaatccgaacactcctatccctagtaaaaaggtgttgcagactatgttggacacaaaggctaccaattggaaagaatttcttaaagagattgatgagaagggcttagatgatgatgatctaattattggtcttaaaggaaaggagagggaactgaagttggcaggtagatttttctccctaatgtcttggaaattgcgagaatactttgtaattaccgaatatttgataaagactcatttcgtccctatgtttaaaggcctgacaatggcggacgatctaactgcagtcattaaaaagatgttagattcctcatccggccaaggattgaagtcatatgaggcaatttgcatagccaatcacattgattacgaaaaatggaataaccaccaaaggaagttatcaaacggcccagtgttccgagttatgggccagttcttaggttatccatccttaatcgagagaactcatgaattttttgagaaaagtcttatatactacaatggaagaccagacttgatgcgtgttcacaacaacacactgatcaattcaacctcccaacgagtttgttggcaaggacaagagggtggactggaaggtctacggcaaaaaggatggactatcctcaatctactggttattcaaagagaggctaaaatcagaaacactgctgtcaaagtcttggcacaaggtgataatcaagttatttgcacacagtataaaacgaagaaatcgagaaacgttgtagaattacagggtgctctcaatcaaatggtttctaataatgagaaaattatgactgcaatcaaaatagggacagggaagttaggacttttgataaatgacgatgagactatgcaatctgcagattacttgaattatggaaaaataccgattttccgtggagtgattagagggttagagaccaagagatggtcacgagtgacttgtgtcaccaatgaccaaatacccacttgtgctaatataatgagctcagtttccacaaatgctctcaccgtagctcattttgctgagaacccaatcaatgccatgatacagtacaattattttgggacatttgctagactcttgttgatgatgcatgatcctgctcttcgtcaatcattgtatgaagttcaagataagataccgggcttgcacagttctactttcaaatacgccatgttgtatttggacccttccattggaggagtgtcgggcatgtctttgtccaggtttttgattagagccttcccagatcccgtaacagaaagtctctcattctggagattcatccatgtacatgctcgaagtgagcatctgaaggagatgagtgcagtatttggaaaccccgagatagccaagtttcgaataactcacatagacaagctagtagaagatccaacctctctgaacatcgctatgggaatgagtccagcgaacttgttaaagactgaggttaaaaaatgcttaatcgaatcaagacaaaccatcaggaaccaggtgattaaggatgcaaccatatatttgtatcatgaagaggatcggctcagaagtttcttatggtcaataaatcctctgttccctagatttttaagtgaattcaaatcaggcacttttttgggagtcgcagacgggctcatcagtctatttcaaaattctcgtactattcggaactcctttaagaaaaagtatcatagggaattggatgatttgattgtgaggagtgaggtatcctctttgacacatttagggaaacttcatttgagaaggggatcatgtaaaatgtggacatgttcagctactcatgctgacacattaagatacaaatcctggggccgtacagttattgggacaactgtaccccatccattagaaatgttgggtccacaacatcgaaaagagactccttgtgcaccatgtaacacatcagggttcaattatgtttctgtgcattgtccagacgggatccatgacgtctttagttcacggggaccattgcctgcttatctagggtctaaaacatctgaatctacatctattttgcagccttgggaaagggaaagcaaagtcccactgattaaaagagctacacgtcttagagatgctatctcttggtttgttgaacccgactctaaactagcaatgactatactttctaacatccactctttaacaggcgaagaatggaccaaaaggcagcatgggttcaaaagaacagggtctgcccttcataggttttcgacatctcggatgagccatggtgggttcgcatctcagagcactgcagcattgaccaggttgatggcaactacagacaccatgagggatctgggagatcagaatttcgactttttattccaagcaacgttgctctatgctcaaattaccaccactgttgcaagagacggatggatcaccagttgtacagatcattatcatattgcctgtaagtcctgtttgagacccatagaagagatcaccctggactcaagtatggactacacgcccccagatgtatcccatgtgctgaagacatggaggaatggggaaggttcgtggggacaagagataaaacagatctatcctttagaagggaattggaagaatttagcacctgctgagcaatcctatcaagtcggcagatgtataggttttctatatggagacttggcgtatagaaaatctactcatgccgaggacagttctctatttcctctatctatacaaggtcgtattagaggtcgaggtttcttaaaagggttgctagacggattaatgagagcaagttgctgccaagtaatacaccggagaagtctggctcatttgaagaggccggccaacgcagtgtacggaggtttgatttacttgattgataaattgagtgtatcacctccattcctttctcttactagatcaggacctattagagacgaattagaaacgattccccacaagatcccaacctcctatccgacaagcaaccgtgatatgggggtgattgtcagaaattacttcaaataccaatgccgtctaattgaaaagggaaaatacagatcacattattcacaattatggttattctcagatgtcttatccatagacttcattggaccattctctatttccaccaccctcttgcaaatcctatacaagccatttttatctgggaaagataagaatgagttgagagagctggcaaatctttcttcattgctaagatcaggagaggggtgggaagacatacatgtgaaattcttcaccaaggacatattattgtgtccagaggaaatcagacatgcttgcaagttcgggattgctaaggataataataaagacatgagctatcccccttggggaagggaatccagagggacaattacaacaatccctgtttattatacgaccaccccttacccaaagatgctagagatgcctccaagaatccaaaatcccctgctgtccggaatcaggttgggccaattaccaactggcgctcattataaaattcggagtatattacatggaatgggaatccattacagggacttcttgagttgtggagacggctccggagggatgactgctgcattactacgagaaaatgtgcatagcagaggaatattcaatagtctgttagaattatcagggtcagtcatgcgaggcgcctctcctgagccccccagtgccctagaaactttaggaggagataaatcgagatgtgtaaatggtgaaacatgttgggaatatccatctgacttatgtgacccaaggacttgggactatttcctccgactcaaagcaggcttggggcttcaaattgatttaattgtaatggatatggaagttcgggattcttctactagcctgaaaattgagacgaatgttagaaattatgtgcaccggattttggatgagcaaggagttttaatctacaagacttatggaacatatatttgtgagagcgaaaagaatgcagtaacaatccttggtcccatgttcaagacggtcgacttagttcaaacagaatttagtagttctcaaacgtctgaagtatatatggtatgtaaaggtttgaagaaattaatcgatgaacccaatcccgattggtcttccatcaatgaatcctggaaaaacctgtacgcattccagtcatcagaacaggaatttgccagagcaaagaaggttagtacatactttaccttgacaggtattccctcccaattcattcctgatccttttgtaaacattgagactatgctacaaatattcggagtacccacgggtgtgtctcatgcggctgccttaaaatcatctgatagacctgcagatttattgaccattagccttttttatatggcgattatatcgtattataacatcaatcatatcagagtaggaccgatacctccgaaccccccatcagatggaattgcacaaaatgtggggatcgctataactggtataagcttttggctgagtttgatggagaaagacattccactatatcaacagtgtttagcagttatccagcaatcattcccgattaggtgggaggctgtttcagtaaaaggaggatacaagcagaagtggagtactagaggtgatgggctcccaaaagatacccgaacttcagactccttggccccaatcgggaactggatcagatctctggaattggtccgaaaccaagttcgtctaaatccattcaatgagatcttgttcaatcagctatgtcgtacagtggataatcatttgaaatggtcaaatttgcgaagaaacacaggaatgattgaatggatcaatagacgaatttcaaaagaagaccggtctatactgatgttgaagagtgacctacacgaggaaaactcttggagagattaa

SEQ ID NO: 15138 - DNA, 60 bp, unidentified; identical to SEQ ID NO: 8031
  misc_feature 1..60: note = Synthetic
  source 1..60: mol_type = other DNA

SEQ ID NO: 15139 - DNA, 10026 bp, unidentified; identical to SEQ ID NO: 10771
  source 1..10026: mol_type = other DNA
  misc_feature 1..10026: note = Synthetic

SEQ ID NO: 15140 - DNA, 1593 bp, unidentified; identical to SEQ ID NO: 10522
  source 1..1593: mol_type = other DNA
  misc_feature 1..1593: note = Synthetic

SEQ ID NO: 15141 - DNA, 54 bp, unidentified; identical to SEQ ID NO: 8045
  misc_feature 1..54: note = Synthetic
  source 1..54: mol_type = other DNA

SEQ ID NO: 15142 - DNA, 72 bp, unidentified; identical to SEQ ID NO: 8046
  misc_feature 1..72: note = Synthetic
  source 1..72: mol_type = other DNA

SEQ ID NO: 15143 - DNA, 15 bp, unidentified
  source 1..15: mol_type = other DNA
  misc_feature 1..15: note = Synthetic
atgctggagaaatag

SEQ ID NO: 15144 - DNA, 669 bp, unidentified
  misc_feature 1..669: note = Synthetic
  source 1..669: mol_type = other DNA
aggccaagattatcagggactatggaggaagacaggaactggatagtagtccccacctggagggtgccagggaggatggagaaatggcatgcccttgtcaagtacctgaaatacagaacaaaagacctagaggaggtgcgctatgttccccaccacaaggtgggatgggcatggtggacttgcagcagggtaatattcccactacaaggaaaaagtcatctagaaatacaggcatattggaacctaacaccagaaaaaggatggctctcctctcatgcagtaagattaacctggtatacagaaaagttctggacagatgttaccccagactgtgcagacatcctaatacatagcacttatttctcttgctttacggcaggtgaagtaagaagagccatcagaggggaaaagttattgtcctgctgcaactatccccaagctcataaagcacaggtaccatcacttcaatacctagccctagtagtagtacaacaaaatgacagaccccagagaaagggtaccgccaggaaacagtggagaagagaccattggagaggccttcgagtggctagagaggaccatagaagccttaaacagggaggcagtgaaccatctgccccgagagctcattttccaggtgtggcaaaggtcctggagatattggcatga

SEQ ID NO: 15145 - DNA, 72 bp, unidentified; identical to SEQ ID NO: 8051
  source 1..72: mol_type = other DNA
  misc_feature 1..72: note = Synthetic

SEQ ID NO: 15146 - DNA, 72 bp, unidentified; identical to SEQ ID NO: 8051
  source 1..72: mol_type = other DNA
  misc_feature 1..72: note = Synthetic

SEQ ID NO: 15147 - DNA, 1167 bp, unidentified
  misc_feature 1..1167: note = Synthetic
  source 1..1167: mol_type = other DNA
ctgaggatggaacacgaccttgagaggggcccaccgggcccgcgacggccccctcgaggaccccccctctcctcttccctaggccttgctctccttctcctcctcttggcgctactgttttggctgtacatcgttatgagtgactggactggaggagccctccttgtcctctattcctttgctctcatgcttataattataattttgatcatctttatcttcagaagagaccttctctgtccacttggagccctttgtatactcctactgatgatcaccctcctgctcatcgctctctggaatttgcacggacaggcattgttccttggaattgtgctgttcatcttcgggtgcttacttgtcttaggtatctggatctacttattggagatgctctggcgacttggtgccaccatctggcagcttttggccttcttcctagccttcttcctagacctcatcctgctcattattgctctctatctacaacaaaactggtggactctattggttgatctcctttggctcctcctgtttctggcgattttaatctggatgtattaccatggacaacgacacagtgatgaacaccaccacgatgactccctcccgcaccctcaacaagctaccgatgattctggccatgaatctgactctaactccaacgagggcagacaccacctgctcgtgagtggagccggcgacggacccccactctgctctcaaaacctaggcgcacctggaggtggtcctgacaatggcccacaggaccctgacaacactgatgacaatggcccacaggaccctgacaacactgatgacaatggcccacatgacccgctgcctcaggaccctgacaacactgatgacaatggcccacaggaccctgacaacactgatgacaatggcccacatgacccgctgcctcatagccctagcgactctgctggaaatgatggaggccctccacaattgacggaagaggttgaaaacaaaggaggtgaccagggcccgcctttgatgacagacggaggcggcggtcatagtcatgattccggccatggcggcggtgatccacaccttcctacgctgcttttgggttcttctggttccggtggagatgatgacgacccccacggcccagttcagctaagctactatgactaa

SEQ ID NO: 15148 - DNA, 1122 bp, unidentified
  source 1..1122: mol_type = other DNA
  misc_feature 1..1122: note = Synthetic
ctgaggatggaacacgaccttgagaggggcccaccgggcccgcgacggccccctcgaggaccccccctctcctcttccctaggccttgctctccttctcctcctcttggcgctactgttttggctgtacatcgttatgagtgactggactggaggagccctccttgtcctctattcctttgctctcatacttataattataattttgatcatctttatcttcagaagagaccttctctgtccacttggagccctttgtctactcctactgatgatcaccctcctgctcatcgctctctggaatttgcacggacaggcattgtaccttggaattgtgctgttcatcttcgggtgcttacttgtcttaggtctctggatctacttattggagattctctggcgacttggtgccaccatctggcagcttttggccttcttcctagccttcttcctagacctcatcctgctcattattgctctctatctgcaacaaaactggtggactctattggttgatctcctttggctcctcctgtttctggcgattttgatctggatgtattaccatggacaacgacacagtgatgaacaccaccacgatgactccctcccgcaccctcaacaagctaccgatgattctggccatgaatctgactctaactccaacgagggcagacaccacctgctcgtgactggagccggcgacggacccccactctgctctcaaaacctaggcgcacctggaggtggtcctgacaatggcccacaggaccctgacaacactgatgacaatggcccacaggaccctgacaacactgatgacaatggcccacaggaccctgacaacactgatgacaatggcccacaggaccctgacaacactgctgacaatggcccacatgacccgctgcctcataaccctagcgactctgctggaaatgatggaggcccaccaaatttgacggaagaggttgaaaacaaaggaggtgaccggggcccgccttcgatgacagacggtggcggcggtgatccacaccttcctacgctgcttttgggtacttctggttccggtggagatgatgacgacccccacggcccagttcagctaagctactatgactaa

SEQ ID NO: 15149 - DNA, 21 bp, unidentified
  source 1..21: mol_type = other DNA
  misc_feature 1..21: note = Synthetic
atggaatatatgggatggtaa

SEQ ID NO: 15150 - DNA, 21 bp, unidentified
  misc_feature 1..21: note = Synthetic
  source 1..21: mol_type = other DNA
atgaacttaaacagatgttga

SEQ ID NO: 15151 - DNA, 162 bp, unidentified
  misc_feature 1..162: note = Synthetic
  source 1..162: mol_type = other DNA
ttgagagacagagatcctaatgataccaggaaccaattcaagaataatgctttacacgcatacctttttaatgagcattgtaataatgtcgaggtcgtcaaactactactagacagtggcactaatccattacgcaaaaattggagacagctaccccattag

SEQ ID NO: 15152 - DNA, 84 bp, unidentified; identical to SEQ ID NO: 8058
  source 1..84: mol_type = other DNA
  misc_feature 1..84: note = Synthetic

SEQ ID NO: 15153 - DNA, 135 bp, unidentified
  misc_feature 1..135: note = Synthetic
  source 1..135: mol_type = other DNA
attactctaggatctgatttggaagcgtatttcatgtgtaagttacaggaacttaattgtgacgcgagtattctcttgaacaaggcatcaaaaaatgtaatggatagacaattatcaaaaactccaacgagataa

SEQ ID NO: 15154 - DNA, 135 bp, unidentified; identical to SEQ ID NO: 8453
  misc_feature 1..135: note = Synthetic
  source 1..135: mol_type = other DNA

SEQ ID NO: 15155 - DNA, 90 bp, unidentified
  misc_feature 1..90: note = Synthetic
  source 1..90: mol_type = other DNA
atgatacagtttatgatagcaatccaatatcttacatattttttgatgatatcagtttttatcacagacagatgtttaaaaactacttaa

SEQ ID NO: 15156 - DNA, 39 bp, unidentified; identical to SEQ ID NO: 8063
  misc_feature 1..39: note = Synthetic
  source 1..39: mol_type = other DNA

SEQ ID NO: 15157 - DNA, 27 bp, unidentified
  misc_feature 1..27: note = Synthetic
  source 1..27: mol_type = other DNA
atcaacatacaaataagaaaaacttag

SEQ ID NO: 15158 - DNA, 1686 bp, unidentified
  misc_feature 1..1686: note = Synthetic
  source 1..1686: mol_type = other DNA
atgaggcgagtcgtgctaggcggagcggtggtgtatccggagggtcctcctccttcgtacgagagcgtgatgcagcagcagcaggcgacggcggtgatgcaatccccactggaggctccctttgtgcctccgcgatacctggcacctacggagggcagaaacagcattcgttattcggaactggcacctcagtacgataccaccaggttgtatctggtggacaacaagtcggcggacattgcttctctgaactatcagaatgaccacagcaacttcttgaccacggtggtgcaaaacaatgactttacccctacggaagccagcacccagaccattaactttgatgaacgatcgcggtggggcggtcagctaaagaccatcatgcatactaacatgccaaacgtgaacgagtatatgtttagtaacaagttcaaagcgcgtgtgatggtgtccagaaaacctcccgacggtgctgcagttggggatacttatgatcacaagcaggatattttgaaatatgagtggttcgagtttactttgccagaaggcaacttttcagttactatgactattgatttgatgaacaatgccatcatagataattacttgaaagtgggtagacagaatggagtgcttgaaagtgacattggtgttaagttcgacaccaggaacttcaagctgggatgggatcccgaaaccaagttgatcatgcctggagtgtatacgtatgaagccttccatcctgacattgtcttactgcctggctgcggagtggattttaccgagagtcgtttgagcaaccttcttggtatcagaaaaaaacagccatttcaagagggttttaagattttgtatgaagatttagaaggtggtaatattccggccctcttggatgtagatgcctatgagaacagtaagaaagaacaaaaagccaaaatagaagctgctacagctgctgcagaagctaaggcaaacatagttgccagcgactctacaagggttgctaacgctggagaggtcagaggagacaattttgcgccaacacctgttccgactgcagaatcattattggccgatgtgtctgaaggaacggacgtgaaactcactattcaacctgtagaaaaagatagtaagaatagaagctataatgtgttggaagacaaaatcaacacagcctatcgcagttggtatctttcgtacaattatggcgatcccgaaaaaggagtgcgttcctggacattgctcaccacctcagatgtcacctgcggagcagagcaggtctactggtcgcttccagacatgatgaaggatcctgtcactttccgctccactagacaagtcagtaactaccctgtggtgggtgcagagcttatgcccgtcttctcaaagagcttctacaacgaacaagctgtgtactcccagcagctccgccagtccacctcgcttacgcacgtcttcaaccgctttcctgagaaccagattttaatccgtccgccggcgcccaccattaccaccgtcagtgaaaacgttcctgctctcacagatcacgggaccctgccgttgcgcagcagtatccggggagtccaacgtgtgaccgttactgacgccagacgccgcacctgtccctacgtgtacaaggcactgggcatagtcgcaccgcgcgtcctttcaagccgcactttctaa

SEQ ID NO: 15159 - DNA, 21 bp, unidentified
  source 1..21: mol_type = other DNA
  misc_feature 1..21: note = Synthetic
atacctaactcgagaagctaa

SEQ ID NO: 15160 - DNA, 45 bp, unidentified; identical to SEQ ID NO: 8072
  misc_feature 1..45: note = Synthetic
  source 1..45: mol_type = other DNA

SEQ ID NO: 15161 - DNA, 21 bp, unidentified
  source 1..21: mol_type = other DNA
  misc_feature 1..21: note = Synthetic
atggagttcctaggagtttga

SEQ ID NO: 15162 - DNA, 1773 bp, unidentified
  misc_feature 1..1773: note = Synthetic
  source 1..1773: mol_type = other DNA
ctgctcacgacaagcagtacagtagacttcctcaagtgtccactcaatatggacaaatcatattacacagagcctgaagatcaaagaggtaactctcgaacatggagactattatttaggttgattgtattaacgttgctctgtctgatcgcatgtacctcagtaagtcaattgttctatccttggctcccccaagtcttgtccactctgatcagcctaaatagctcaattatcacaagcagcaatggtctcaaaaaggaaatcctgaaccagaacataaaagaggacctcatatatagagaagttgctataaatatacctttaacattagatagggttactgttgaggtagggactgcagtaaaccagattactgatgcactcaggcaactccagtcagttaatggatctgctgcattcgccttatcaaactctcctgattatagtgggggaatagaacatctggttttccaaaggaatacgcttattaatcgctcagtgagtgtctcagatttaatagaacaccccagtttcataccaactcctaccacacagcatggttgtaccagaatccccacgttccacctaggaactcgccactggtgctatagtcacaatataataggtcagggatgtgctgattctggagctagtatgatgtatatttcaatgggagcactgggtgtcagttcattgggaaccccgaccttcacaacatctgctacatcaatattatctgatagcctcaatcggaagagttgcagtatagtagcgacaactgagggttgtgacgtactctgcagtatagttacacaaacagaagaccaagattatgccgatcacactcctactccaatgatacatggtagattatggtttaatggcacatacacagagagatctttatcccagagtttattccttggaacatgggctgcgcaatatccagctgtaggatctggtataatgacacctgggcgagttatattccctttctatggaggtgtgatccccaactctcctctcttcttggatctcgaaagattcgctttattcacacataatggagacttagaatgcaggaacttaacacaatatcagaaagaagcaatttactctgcatataagcctcccaagattagaggatcactgtgggcacaaggcttcatagtatgttcagtaggagacatggggaattgctctcttaaagtgatcaatacaagcacagttatgatgggtgcagaaggtcggctacaattagttggggactccgttatgtactatcagagatcatcatcctggtggcctgtggggattctttatcggttgagtcttgtagacatcatcgccagagatatacaggtagtcataaacagcgaaccactccctctgagcaagttcccgcggccaacctggactccaggagtatgtcaaaaaccaaatgtatgccctgcagtatgtgtaactggggtctatcaagacctttgggcaatttccgcaggagagacactatctgaaatgacattctttggaggatatttagaggcatccacccaacgaaaagatccatggataggcgttgctaatcaatatagttggttcatgagaagaagattattcaagacaagcactgaagcagcatattcgtcatcaacgtgttttaggaacactagactggatcgaaatttctgcctgttaatctttgaattaaccgataacttacttggagactggagaattgtccccctcttatttgaattaaccattgtataa

SEQ ID NO: 15163 - DNA, 639 bp, unidentified
  source 1..639: mol_type = other DNA
  misc_feature 1..639: note = Synthetic
atggcccaagccataattggtgcaattgctgcttccacagcaggtagtgctctgggagcgggcatacaggttggtggcgaagcggccctccaaagccaaaggtatcaacaaaatttgcaactgcaagaaaattcttttaaacatgacagggaaatgattgggtatcaggttgaagcttcaaatcaattattggctaaaaatttggcaactagatattcactcctccgtgctgggggtttgaccagtgctgatgcagcaagatctgtggcaggagctccagtcacccgcattgtagattggaatggcgtgagagtgtctgctcccgagtcctctgctaccacattgagatccggtggcttcatgtcagttcccataccatttgcctctaagcaaaaacaggttcaatcatctggtattagtaatccaaattattccccttcatccatttctcgaaccactagttgggtcgagtcacaaaactcatcgagatttggaaatctttctccataccacgcggaggctctcaatacagtgtggttgactccacccggttcaacagcctcttctacactgtcttctgtgccacgtggttatttcaatacagacaggttgccattattcgcaaataataggcgatga

SEQ ID NO: 15164 - DNA, 639 bp, unidentified; identical to SEQ ID NO: 15163
  source 1..639: mol_type = other DNA
  misc_feature 1..639: note = Synthetic

SEQ ID NO: 15165 - DNA, 471 bp, unidentified
  misc_feature 1..471: note = Synthetic
  source 1..471: mol_type = other DNA
atcgtattaaaagccgtgtattcccccgcactaaagaataaatccccagtagacatcatgcgtactgttggtgtatttctggccacctgtcttgtcaccattttcgtcctcccaacatggggcaattgggcatacccatgttgtcacgtcactcagctccgcgctcaacaccttctcgcgttggaaaacattagcgacatttacctggtgagcaatcagacatgcgacggctttagcctggcctccttaaattcacctaagaatgggagcaaccagctggtcatcagccgctgcgcaaacggactcaacgtggtctccttctttatctccatcctgaagcgaagcagctccgccctcacgggccatctccgtgagttgttaaccaccctggagactctttacggttcattctcagtggaagacctgtttggtgccaacttaaacagatacgcatggcatcgcgggggctag

SEQ ID NO: 15166 - DNA, 63 bp, unidentified; identical to SEQ ID NO: 8080
  source 1..63: mol_type = other DNA
  misc_feature 1..63: note = Synthetic

SEQ ID NO: 15167 - DNA, 456 bp, unidentified
  misc_feature 1..456: note = Synthetic
  source 1..456: mol_type = other DNA
gtgtattcccccgcactaaagaataaatccccagtagacatcatgcgtgctgttggtgtatttctggccacctgtcttgtcaccattttcgtcctcccaacatggggcaattgggcatacccatgttgtcacgtcactcagctccgcgctcaacaccttctcgcgttggaaaacattagcgacatttacctggtgagcaatcagacatgcgacggctttagtctggcctccttaaattcacctaagaatgggagcaaccagctggtcatcagccgctgcgcaaacggactcaacgtggtctccttctttatctccatcctgaagcgaagcagctccgccctcacgagccatctccgtgagttgttaaccaccctggagtctctttacggttcattctcagtggaagacctgtttggtgccaacttaaacagatacgcatggcatcgcgggggctag

SEQ ID NO: 15168 - DNA, 69 bp, unidentified; identical to SEQ ID NO: 8082
  misc_feature 1..69: note = Synthetic
  source 1..69: mol_type = other DNA

SEQ ID NO: 15169 - DNA, 471 bp, unidentified
  misc_feature 1..471: note = Synthetic
  source 1..471: mol_type = other DNA
atcgtattaaaagccgtgtattcccccgcactaaagaataaatccccagtagacatcatgcgtgctgttggtgtatttctggccatctgtcttgtcaccattttcgtcctcccaacatggggcaattgggcatacccatgttgtcacgtcactcagctccgcgctcaacaccttctcgcgttggaaaacattagcgacatttacctggtgagcaatcagacatgcgacggctttagcctggcctccttaaattcacctaagaatgggagcaaccagctggtcatcagccgctgcgcaaacggactcaacgtggtctccttctttatctccatcctgaagcgaagcagctccgccctcacgggccatctccgtgagttgttaaccaccctggagactctttacggttcattctcagtggaagacctgtttggtgccaacttaaacagatacgcatggcatcgcgggggctag

SEQ ID NO: 15170 - DNA, 57 bp, unidentified; identical to SEQ ID NO: 8084
  source 1..57: mol_type = other DNA
  misc_feature 1..57: note = Synthetic

SEQ ID NO: 15171 - DNA, 948 bp, unidentified
  misc_feature 1..948: note = Synthetic
  source 1..948: mol_type = other DNA
ataaaaaatcaaaaaaaagtgcgcgtgcgggcgagcatgtaccgagaagagaaaacgcttcgcattgacctcccgcccagcgtggccagcttcatcaagcacggcttccggcaccacgtgcgctggcccacgctggcgctcggcgtggtgctggccaacactaccacagccattaacgaagagtggctcacagccgtggagtccatgcccacgcgcaaggtcttccacgccttcgtggagcccgtgctggagggcacgctgcacatgtgcgtgcacctcaagaagacgcagagcgagggcgacgcgtacgtgtccatgcacgactttgactactacgtggtgcgcgacgacggcacgctgagcaagctcaagaagcccaaggagctgcgcgagacgctgctgcacagcttcctggagtaccggctcaagaacaccaagagcatcgagctggtggcctttagcagcggcacgcagatccgcgaggagctgctgacgcacctggccggggtgctggacatcgaggtcttcacgcgcgagcacgccaacgtgaaggtgaccttccccgaggagcctcgcagcacgtgtccgtttggcgtgatcgcgccgcgcgggcagctgcgcatcttcttcgaggcctacccctgggttgacacgcaccagcacctgcacgccgtgctgcgcctgctggagaggaagcttgtggccgacgtgcgcagcagccagatccttgtcacgccggaactggacttcgagggcggcgtgtccaagtacgaccccgcgagccgcatgctgctggtccgcgacatggtgaccatgagcatcgttaactttttcggcgcgcgtgcgcagctcgacacctaccacgatttcgacatgcgtgtcgtggacaccgagcgcttcctgtccgcgctcgcggaggcttttgctaccctgcgcgcgctcgtctaa

SEQ ID NO: 15172 - DNA, 198 bp, unidentified
  misc_feature 1..198: note = Synthetic
  source 1..198: mol_type = other DNA
atgagtagggttaatcgagcgattcaggcacaccacaaactaaaaaaagtgtaccggacactatattccggtttgcaaaacaaaaatgttcttaactacattcacaaaaagttacctctcgcgacttcttctttttctgtctcaatatgtgatacgattatgatcactaaaatattaaacctctttctgatggagtaa

SEQ ID NO: 15173 - DNA, 198 bp, unidentified; identical to SEQ ID NO: 15172
  misc_feature 1..198: note = Synthetic
  source 1..198: mol_type = other DNA

SEQ ID NO: 15174 - DNA, 78 bp, unidentified
  misc_feature 1..78: note = Synthetic
  source 1..78: mol_type = other DNA
atgttcttaactacattcacaaaaagttacctctcgcgacttcttctttttctgtctcaatatgtgatacgattatga

SEQ ID NO: 15175 - DNA, 78 bp, unidentified; identical to SEQ ID NO: 15174
  misc_feature 1..78: note = Synthetic
  source 1..78: mol_type = other DNA

SEQ ID NO: 15176 - DNA, 171 bp, unidentified
  misc_feature 1..171: note = Synthetic
  source 1..171: mol_type = other DNA
atgggccactgtcaacgccgaaaagcgcttgtctggctgaggttggtgtcgctaatgccagttttttatctcgcttcaatgtcggtgattttcacggagcgtcatgggaaaacggtaccgctcccgatggagagcccggggtatgctgaaattcttcttaaaattacgtaa

SEQ ID NO: 15177 - DNA, 6534 bp, unidentified
  source 1..6534: mol_type = other DNA
  misc_feature 1..6534: note = Synthetic
ttgaacatgggagcccagttgagcagaaatactgccgggagccacactactggaacctacgctaccggaggctcaaccattaattataacaacattaactactacagccacgccgcttctgcagcgcagaacaaacaagacttcacccaggacccatccaagttcactcagccaattgcggatgtgataaaggagacagcggttccacttaagtcaccaagcgcagaagcgtgcggttacagtgatcgcgtagcccagttgacacttggcaacagcactatcactacccaagaggcagcaaatatatgcgttgcttatggctgctggcctgcaaagcttagcgacactgatgccacatcagtggacaagcccactgaaccaggtgtatcagcggagcgcttttataccctccgttccaagccgtggcaggcagatagcaaggggtggtattggaagctacccgatgcactcaacaatacaggaatgtttggacagaacgcccagttccactacatctatagaggtgggtgggcagtgcacgtccaatgcaatgcaaccaaattccaccagggcacgctccttgtgcttgcaatcccagaacaccaaatcgccacacaagagcagcccgcttttgacagaaccatgccaggcagcgaaggcggcactttccaagagcccttctggctcgaggatggaacgtctttaggaaactccctgatctatccgcaccagtggatcaaccttaggacaaacaattcagcaaccctgatattaccatacgtgaatgccattccgatggactcggccattaggcattcaaattggacactagctatcattccagttgcacccttgaaatatgcagccgagaccacgccgcttgtccccattactgtgactatcgcaccgatggagacggagtacaacgggcttagacgcgctatagctagcaatcaaggccttccaactaagccagggccaggttcctaccagttcatgactactgatgaggattgttccccgtgcattttgcctgatttccagccgacccctgaaattttcatccctggtaaggtcaataaccttttggaaattgcgcaagttgagtctatccttgaggccaacaacagggaaggggtagagggtgttgagcggtatgtcatcccagtaagtgttcaggacgcattggatgcccagatttatgccctaagacttgagcttggcggaagtggccctctctcctccagccttctaggtaccttagcaaagcattatacccaatggagtgggtcagtggagatcacctgcatgttcactggcaccttcatgacaacaggaaaggtcctcttggcatacacacctccaggtggagatatgcctaggaatagagaagaagccatgcttggaacgcatgttgtctgggactttggtctacaatcatcaataaccttggtcataccttggatctctgcatcacattttagaggagtcagtaatgacgatgtgctgaattaccaatattatgcagcaggtcatgtcaccatctggtaccaaacaaacatggtaatccctccgggattccctaacacggcaggcataatcatgatgattgccgcacagccaaacttctccttccgcattcaaaaggatagggaagacatgacccaaactgcaattctgcagaatgacccaggcaagatgctaaaggatgcgattgacaaacaagttgcaggagccctagttgctggtaccacgacatccacccactcagtagccacggacagcacaccagccctgcaggccgctgagactggtgccacgtcaactgccagggatgagagcatgattgagacccgcactattgtgccgactcacggtatccacgagacaagtgtggagagtttctttggacgctcctcactcgtgggtatgccgctgctggccactggcaccagtatcaccaactggcgcattgacttcagggagttcgtccagttgagagccaagatgtcctggtttacttacatgcgctttgacgtggagttcaccataattgcaacaagttctactgggcagaatgttaccaccgagcagcacaccacttaccaggtgatgtacgtcccccctggggcacccgttccctccaatcaagactcatttcagtggcaatctgggtgcaacccctcggtattcgcggacacggacggaccacctgcccaattctcagtacccttcatgagctcagccaatgcgtattccacggtttatgatgggtacgcacgattcatggacactgacccagatagatatggcatcctcccgagcaatttcctgggattcatgtacttcaggacactcgaagacgcagcacaccaagtaaggttccgcatctgtgccaaaataaaacacaccagctgctggatcccacgtgcacccagacaagcaccatacaagaagaggtacaacctggtattcagtggggattccgacaggatttgttctaacagagccagcttgactagctatggaccctttgggcagcagcagggtgctgcgtatgtgggctcctacaaaattttaaacagacaccttgccacatacgctgattgggaaaatgaagtctggcaatcttaccagcgtgatctacttgttactagagttgatgctcacgggtgtgacaccatcgctcgatgcaattgcagatctggtatctattactgcaaatccacagccaagcactatcctattgtagtcacgcccccatctatctacaagattgaggccaacgattattacccagaaagaatgcaaactcacatccttcttgggattggcttcgctgagcccggtgattgcggtggtcttcttcgttgtgagcatggtgttatgggcattcttacggttggcggtggagaccatgtcgggtttgcagatgttcgtgacctcctttggatagaggatgacgccatggaacagggaatcactgactacgtccaacagttaggcaatgcctttggagctggattcactgctgagattgcaaattacaccaaccaactcagggacatgttaatgggctcagattcagtagtagagaagatcattaggtctcttgtccgactggtttctgcgctggttatagtggtgagaaaccaccaggatttgattaccgtgggagcaaccctcgcccttctaggttgtgaaggctctccatggaaatggctgaagagaaaggtttgccaaattcttggaatcaacatggcagaaaggcagtcagacaactggatgaaaaagttcactgagatgtgcaacgccttcagaggcctagactggatcgcagcaaaaatctccaagtttattgattggcttaaacaaaagatcctaccagaactcaaagagagagcagagttcgtcaagaagttaaaacagctcccactcttagaggctcaggtgaacactctggaacactcttccgctagtcaggagaggcaagaacaattgtttgggaatgttcagtaccttgcccatcattgtagaaagaacgccccgctttatgccgcagaagctaagcgcgtctaccatctagagaagcgcgtcctccgtgccatgcagttcaagaccaagaaccgcattgaacctgtatgtgcactgattcatggctcacctggtaccggtcagtcgttggctactatgatagtaggaagaaaactggctgagtacgaaggttccgacgtctactccctaccgcctgacccggatcattttgatggctaccaacaacaagccgtcgtagtgatggatgatttacttcaaaaccccgatgggaaggacatgaccttgttttgccaaatggtttcgacggctccttttactgtgcccatggctgctttggaggataaggggaagctcttcacttccaaatttgtgctagcttctactaatgcaggccaagttactccgccaaccgtggctgattataaggcgctgcagagaaggtttttctttgattgtgacattgaggtccagaaggaatacaaaagagatggggtcactctggatgtggccaaggctactgagacctgtgaagactgctccccagccaatttcaagaagtgcatgccgttgatttgcggaaaggccctccagctaaaatcgcgcaagggcgatgggatgagatacagcctggacaccctgattagtgagcttcggcgtgagagcaaccgccgttacaatattggcaacgtccttgaggccctgttccaagggccagtgtgttataagcctcttagaattgaagttcatgaggaagaaccagcaccttccgccattagcgatttgctgcaggcagtcgatagtgaggaggtgagggaatattgcaggtccaagggttggattgttgaagagagggtcactgaacttaagcttgagcgcaacgtgaaccgtgcgctggcagtcattcagagtgtgtctctcattgctgcagtggctgggaccatttacatagtttatcgcctcttttctggtatgcagggcccttactcaggtatcggcacaaactacgccacaaagaaaccagtggtaagacaggtacaaacccaaggtcctctttttgatttcggcgtctccctacttaagaagaacattaggacagtcaaaacaggtgcaggcgagtttaccgccctgggggtttatgatactgtggtggtcctgccccgccatgccatgcctggcaagaccattgaaatgaatgggaaggacattgaagttttggacgcttatgacctcaacgacaagaccgacacttctctagaattgaccatagtgaaattgaaaatgaatgagaagttcagggacattagagcaatggttccggaccaaattacagattacaatgaggcagtggtggttgtgaatacctcatactacccccagctttttacctgcgtggggcgtgtcaaggactacggattcctgaaccttgctggcaggccaacacatagagttttgatgtatgaattccccaccaaggcaggccaatgcggtggtgtggttattagcatgggtaagatagtgggtgtccacgtaggaggtaacggtgcccaaggttttgccgcctcccttctacgcaggtactttacagcagaacaaggacaaattgaatatatcgagaagagtaaagatgccgggtaccccgtgatcaatgcacccacccaaaccaaattagagcccagtgttttctttgatgttttccccggggtgaaagaaccagcggtactccacaagaaggacaagaggcttgaaaccaactttgaggaagctctattttccaagtacataggaaatgtacaaagggacatgcctgaggaattactcattgccatagatcattattctgaacaactcaaaatgttgaatattgacccgaggcccatttcaatggaggatgcaatttacggtacagaggggcttgaggcacttgatcttggaactagtgcgagctacccgtacgttgcaatgggcatcaagaaaagagatattttgaataaagagaccagggatgtcactaagatgcaagagtgcatagataagtatggtttaaatctacccatggtcacctatgtcaaggatgaactcagggcgccagataagatcaggaaaggaaaaagccgtttgatagaggcatctagcttgaatgattcagtagccatgcggtgctactttgggaacctctacaaggttttccacaccaaccctggaaccatctccggctgtgccgttggatgcgaccctgaaaccttctggagcaagatcccagtgatgatggatggtgagctttttggctttgattatactgcatatgatgctagcctgtctcccatgtggttccatgccctggcagaagtccttagacggattggatttgttgagtgcaagcactttattgatcaactttgctgcagccaccacctttatatggataagcactattatgtggttgggggcatgccttctggctgctctggcacctccatcttcaattctatgattaacaacctaatcatccgcactcttgtgctcacagtttataaaaatattgatttggatgatcttaagataatagcctacggggatgacgtgctcgcgtcgtacccgtatgagattgatgccagcctcttggcagaagctggtaaaagctttggtctaatcatgactccaccagataaatctgcggagtttgtcaaattaacctgggataacgtgacctttttgaagaggaagttcgtgcgtgatgcacggtaccctttccttgtacatccggtcatggacatgtcgaacatccatgagtccattcggtggacgaaagatcccaggcatactgaagaccatgtccgctcactttgcctattggcctggcattgtggcgaggaagaatacaacgaatttgttacaaagatccgttccgttcctgtcgggagagccctccatctaccttcattcaaggcgctcgagaggaaatggtacgactctttctga

SEQ ID NO: 15178 - DNA, 12 bp, unidentified
  source 1..12: mol_type = other DNA
  misc_feature 1..12: note = Synthetic
atgcctgcctag

SEQ ID NO: 15179 - DNA, 177 bp, unidentified; identical to SEQ ID NO: 8102
  source 1..177: mol_type = other DNA
  misc_feature 1..177: note = Synthetic

SEQ ID NO: 15180 - DNA, 924 bp, unidentified
  source 1..924: mol_type = other DNA
  misc_feature 1..924: note = Synthetic
atgagcatgcttcccatcaagtcaagcagggctgtgagtggaattcaacagaaacaagaggtccttcctggaatggatacaccatcaaattctatgagacctgttgctgatgataacattgatcatacaagtcataccccgaacggagtggcctcagcattcatcttggaggcaactgtcaatgtgatctcggggcccaaagtcctcatgaaacaaatccctatttggttgccactcggaattgctgaccaaaaaacgtacagttttgactcaacaacagcagcaattatgctcgcatcttatacgatcacccattttggaaaggccaacaaccccctcgttagagtgaatcgacttggtcagggaataccggatcacccactcagattgctcaggatggggaaccaggctttccttcaagagtttgtgctaccaccagttcaactgccgcaatatttcacttttgatctgactgcactcaaactagtgacacagcctctccctgctgcaacatggacagatgagactccgagcaacctttcaggagcccttcgtcccgggctttcatttcacccaaagctgagacccgttctacttccaggcaagacgggaaagaaagggcatgtttctgatctgactgccccagacaaaattcagacaattgtgaacctgatgcaagatttcaaaatcgtgccaattgatccagctaagagtatcattgggatcgaggttccagaattgctggtccacaagctcactgggaagaaaatgagtcagaagaatggacagcctataattcctgtcttactcccaaaatacattgggctagatccaatctcacctggagacctgactatggtcataacaccagattatgatgattgtcattcacctgccagttgctcttatctcagtgaaaagtga

SEQ ID NO: 15181 - DNA, 207 bp, unidentified
  misc_feature 1..207: note = Synthetic
  source 1..207: mol_type = other DNA
ctggacttcgagggcggcgtgtccaagtacgaccccgcgagccgcatgctgctggtccgcgacatggtgaccatgagcatcgttaactttttcggcgcgcgtgcgcagctcgacacctaccacgatttcgacatgcgtgtcgtggacaccgagcgcttcctgtccgcgctcgcggaggcttttgctaccctgcgcgcgctcgtctaa

SEQ ID NO: 15182 - DNA, 1782 bp, unidentified
  source 1..1782: mol_type = other DNA
  misc_feature 1..1782: note = Synthetic
ctggtgccactgccacgactggacgcgacacctcaaaaaagagacgcgagaatgcggttccggtaccgaaagtggagaagaccccgccgtctctttcgatctcgtagacgacgcggctatgctcgccgccgctggagacgccgagcctggggccgccggaggcgggtaaggagataccgaaggcggcgcgggggcaccaaaagacaatacatttctagtattatgcaatggaacccgcagcaccgccatctttgctatatcaagggcatcacgtggctctgcgccgccagagcggaccgcatgtcctggccgggcattaaacagatagcggctacagactccacaagatattggagcactattttagtcggaggatgcggcgttttaacgttatccatggactggttcttctttgagaacctaagatggcggaaccgctggtcgcatagcaacgtgggttacgatttagcaagatacatggggacacacctctacttcccccccctagcggacatctggtacattgtctggacagatacagaatttgttgaccaacccaaaaaggtcatgagttacacgcatccgtggatactcctcatgaccaaaaaacacaaggtcataaaaccccggaaatggaatggcaaaggcaaaaaaatatttctcaaacctcctgcggttttcaattccgcttggtacacttcagacaagtggtgcggggcggggctaggacgcatctacttctcctttttaaacccattcaaacagatcatgcacaccaatcagacagaacagagcttcccctttgcgatagaattgggcaatactgattatgacaaaccgcccaataattcttacgactttaaagacacaaacgaagtaaaaaaggtatggaatacagcaggaaaaaaatactattaccgtgccgattgggacactggtgacggaaatgcaatcatgttgcccaatactctgagtccaaccaccccagccagctggcttctccttgaatgggacgccccctactggctgtggttctggggaaaaacatatcaggattttgtttcatcacacacaccagaaggaaatccatattatggccagatttatgtcaaatggtggcccattaccaacccctacgatcagggaccccacacctaccccgaggacaaagaatggtgcctcatgatgctagatccacaaccaaatttcatgacatgcaatagcatcgcagcggccctaaaaatagcagctttcgggccctgtgtttacgcaccccaagacacacaaacatcacaaatacccattaacattcccatgtattatctctccaaatggcagtggggtggaagtacccaagggaccagcacccacattgacaacccatgcaatccgagacctaaatcaatacaaatcgcagacccagccaccgcccctagagacgtcatacacccctgggatgtggatgcttccggaactatatcaaccgcaaaactcaaacaactcatggaaggacttggttacagggaaccgaaaccgaaaccgggaccccccgagaccctcatacctccgggagcgccgacgccggagctcgactactacagctcggagaccgagagcgatgacttcgacaccggagactccgaggaagaggaggaggaccaccaggacccgcgctgggttcgagagagccttgacaagcttactcgaaggcttaggggtgagcgaagacagcgacagcagctcggaaagggactgctggcccttctaaaagagaaaaaataa

SEQ ID NO: 15183 - DNA, 147 bp, unidentified; identical to SEQ ID NO: 8108
  misc_feature 1..147: note = Synthetic
  source 1..147: mol_type = other DNA

SEQ ID NO: 15184 - DNA, 36 bp, unidentified; identical to SEQ ID NO: 8110
  source 1..36: mol_type = other DNA
  misc_feature 1..36: note = Synthetic

SEQ ID NO: 15185 - DNA, 1572 bp, unidentified; identical to SEQ ID NO: 10555
  source 1..1572: mol_type = other DNA
  misc_feature 1..1572: note = Synthetic

SEQ ID NO: 15186 - DNA, 75 bp, unidentified; identical to SEQ ID NO: 8116
  source 1..75: mol_type = other DNA
  misc_feature 1..75: note = Synthetic

SEQ ID NO: 15187 - DNA, 639 bp, unidentified
  source 1..639: mol_type = other DNA
  misc_feature 1..639: note = Synthetic
atgaaaaaaacatgtaacaccactaacgcgatgaactttctccgcaagatagtgagaggttgcagggatgaggaggatcagaagcccgctctggtgtctgctcctccagatgatgatgacctatggctccctcctccagagtatgtccccttgacagagattacaggcagaaagaacatgaggaacttctgtgttaacggagaggtaaaggtgtgcagccctaatggttactcatttaaaatcttgaggcatatcctcaggtctttcgacggggtatactctggaaatcagaggatgagagggttggtcaaagttgtcattggtctggctctctcggggggaccgattcccgagggaatgaactgggtttacaaggtaagacgcaccctggtgtttcaatgggcagagtcccgtggtcccctagatggggaagagttggagtattcccaagagattacctgggacgatgattctgagtttgtaggttcgcaaatcagggtgagtgccagacagtgccatattcaagggaggatttggtgcatcaacatgaactcaagagcatgtcaattatggtccgacatggctctaaagactcagcagtcggatgaggacaggaacacttccctgctgctagaataa

SEQ ID NO: 15188 - DNA, 87 bp, unidentified; identical to SEQ ID NO: 8119
  source 1..87: mol_type = other DNA
  misc_feature 1..87: note = Synthetic

SEQ ID NO: 15189 - DNA, 1467 bp, unidentified
  misc_feature 1..1467: note = Synthetic
  source 1..1467: mol_type = other DNA
atggatcttaatcagatatctgaaacactaagtgccgtggcagaagaagagcctttaaccatgtttttacttgataaactgtacgccatacgggaaaagatcaagcaagttccattttcgattgttcgcttgtgtcatgtttactgcatgctaataaaatataacgcttctaacaataattgcattttgggccgtaaacttattgaggaaatgcagcagtttttgtgcggcgcgagagtagatggatcggaagacgtttctatggatatgagtgaattgtgcaagctgtacgattactgtccgttattgtgttctgctctgtgtcgtgcgccttgtgtatttgtgaacaagttatttaaaatcgtagagcgtgaaactcgggggcagtcggaaaatccgctctggcatgcgttacggagatataccgtgacagcaactaagctgtatgacatctacacgacaagaaattttttagaacataagggacagcagttttttggggaagcggtgatttacggcgcgaaacatgagcgtgttattagacacctcgtagcgatcttttacgttaaaagggaagtcaaggaaacgttgggattgctgcttgatccttcatctggagttttcggtgcgtctctagacgcgtgttttggaatttcattcaatgaggatggattcctgatggttaaggaaaaagccttgatttttgagattaaattcagatataaatatttacgggataaagaagatcactttgtttctgaactattaaaaaaccccacggagaaatctttttcggattttattttatctcatccggtgcctgccatagagtttcgagaaagagggaagattccgtcatctagagaatatttaatgacgtatgattttcaatatcgtcctcagagaaagttgcgcacttgccccactccagctattttgacacctcatatcaaacaactgttgtgtttgaacgagacacagacgtctacggtaatcgtttttgattgtaagagccacttgagtgagcagaagctgtctgtgtttcagaaggctgtgtttaccgtgaacgtattcgtaaatccgaaacacaggtatttttttcagagtctgttacaacaatatgtaatgactcagttttatattaatgatcatagtaatccagaatatatcgagagtacggaagtgccttctgttcacattgtgacggctctcttcaggagaagaacagaggaagaaaggagtttgcatttggtgattgatgagacggaatatatagaagaagaaatacctttggccttgattgtgactccggtggcaccgaatccggaatttacttgtcgtgttataacagacatatgcaatctgtgggaaaataatatttgcaagcagaccagtttacaagtatgggcacaaagtgctgtaaaccagtatcttgcggcatgtgtaagaaaaccgaaaacaccctga

SEQ ID NO: 15190 - DNA, 27 bp, unidentified
  misc_feature 1..27: note = Synthetic
  source 1..27: mol_type = other DNA
atgcacaatatactacccatctactaa

SEQ ID NO: 15191 - DNA, 1008 bp, unidentified
  source 1..1008: mol_type = other DNA
  misc_feature 1..1008: note = Synthetic
ttgctattccacagttacgccatagacatcgaaaatgaaatcacagaattcttcaataaaatgagagatactctaccagctaaagactctaaatggttgaatccagcatgtatgttcggaggcacaatgaatgatatagccgctctaggagagccattcagcgcaaagtgtcctcctattgaagacagtcttttatcgcacagatataaagactatgtggttaaatgggaaaggctagaaaaaaatagacggcgacaggtttctaataaacgtgttaaacatggtgatttatggatagccaactatacatctaaattcagtaaccgtaggtatttgtgcaccgtaactacaaagaatggtgactgtgttcagggtatagttagatctcatattagaaaacctccttcatgcattccaaaaacatatgaactaggtactcatgataagtatggcatagacttatactgtggaattctttacgcaaaacattataataatataacttggtataaagataataaggaaattaatatcgacgacattaagtattcacaaacgggaaaggaattaattattcataatccagagttagaagatagcggaagatacgactgttacgttcattacgacgacgttagaatcaagaatgatatcgtagtatcaagatgtaaaatacttacggttataccgtcacaagaccacaggtttaaactaatactagatccaaaaatcaacgtaacgataggagaacctgccaatataacatgcactgctgtgtcaacgtcattattgattgacgatgtactgattgaatgggaaaatccatccggatggcttataggattcgattttgatgtatactctgttttaactagtagaggcggtattaccgaggcgaccttgtactttgaaaatgttactgaagaatatataggtaatacatataaatgtcgtggacacaactattattttgaaaaaacccttacaactacagtagtattggagtaa

SEQ ID NO: 15192 - DNA, 30 bp, unidentified; identical to SEQ ID NO: 8131
  source 1..30: mol_type = other DNA
  misc_feature 1..30: note = Synthetic

SEQ ID NO: 15193 - DNA, 1923 bp, unidentified
  source 1..1923: mol_type = other DNA
  misc_feature 1..1923: note = Synthetic
atgttacgaaaccagtcagttggtaacggcgtctctaaacaggcatcagctaaagctgcaactttctcaacaatcaactccaccttagcagcagatgacatgtttaaaaggaattttgtgtcatatttaccattgaataatgaagacaatgacattttatttccttctattaagactataaaatttatagaaatgctacacggtaaaaaagaattctttaagggacaatctatacacagtgttcttagagactcggctgtctttaagaagcaaatgttttacacactgtcacacactctcttgaatagtatatccatccagcagatcaatgctgaatggcaacgtcatctgaaagcatttccgttccgcagtaaaggcatgtcatttcaagaatattttaatatctggtattatgcaatcaaacaggtaatcctggaaggcattttgcaaacgataaactacatccttcaaaatctcgataacgacatttataataaatacattgattggatttgtacgattggaataacaccaattgtcacattaccaaaaaacaaggttacgctgacacccttagcaaaaagtatttcctctagattgattcaagaaatcatacgaaacaaacagaactttctactgcacattttaacacagatctcctcaacatctattgccgatttcaccaacataaacatttatcgaaacaagtcaaacggcaatataacctgtctctccaataacaaggaactagagtactttgtttacagtgcaccatatttcataaataatcaattgctgtttacaacacccctagctcacttatactcagaattgaataaacacgaaaacctacacaggcaccgtaaaatgtgtcaattgctgaatacttttccaattaaagttttaactacatcaaagaacagtgttgataacaaaaaaattctagaacttatagaaagagaggaaaaaaccagcgatgcgaaaaaaagtcttataaagtttctattaaacttgtccgatagtaaatctaaaattggaataacagatagtattgagggttttttacaagacatcacgccgtctataattgaccaaaataaattattaatcagcaaaggaaatttgcaacgtcgtgggcaggacaataatgatcgcgatattagagatatcttcaaaaaacaaatcataaaatgcatggaggaacagattcaatcacaactggacgaaatcgaaacactgaaaactgcaaatcggctatttgaaaataagattaaagacatgcattcattaataaatttatccgaaacttctaaacatgactttactttagattcagatattgaaagcttgtctctcgctaaagctctgaacaaagttcaaagtctcccattcactagtgtatcaatagacgacaccagagctgtggcaaacagttttttttcacaatatattccagatattgaatacgcagacaaaaaaattgatcaattatgggaaactgaatacacaaggacattccgtctacgaaaaaatgtcaacaatcaaggacaggaagacagcatctcatattcaaattacacgctagaattgcttcttatacccttcatgaaacatgttctaaaattaagacattttgaactgctcccagaagagtttctgttcctctctctaaaagagattatgttagctgtgtactcaaactgtaaaattaagcattatttaagattaatctatatacggcagattaacgagctttcgcatttaatacatactcagaaacaaagtgatttgactttgacacctgatttaggatccacaaacccagaagattttcaatatccgcaagatgacgttgccagcaagcttaaaaggattcgaaactctagacatattcaatatatcaagcgtccggaatatctgtga

SEQ ID NO: 15194 - DNA, 564 bp, unidentified
  source 1..564: mol_type = other DNA
  misc_feature 1..564: note = Synthetic
atggtttccactaccacattccttatgcttactagtctcgcaactctgacttctgctcgctcacacctcactgtaactataggctcaaactgcacactaaaaggacctcaaggtggtcatgtcttttggtggagaatatatgacaatggatggtttacaaaaccatgtgaccaacctggtagatttttctgcaacggcagagacctaaccattatcaacgtgacagcaaatgacaaaggcttctattatggaaccgactataaaagtagtttagattataacattattgtactgccatctaccactccagcaccccgcacaactactttctctagcagcagtgtcgctaacaatacaatttccaatccaacctttgccgcgcttttaaaacgcactgtgaataattctacaacttcacatacaacaatttccacttcaacaatcagcattatcgctgcagtgacaattggaatatctattcttgtttttaccataacctactacgcctgctgctatagaaaagacaaacataaaggtgatccattacttagatttgatatttaa

SEQ ID NO: 15195 - DNA, 114 bp, unidentified; identical to SEQ ID NO: 8136
  source 1..114: mol_type = other DNA
  misc_feature 1..114: note = Synthetic

SEQ ID NO: 15196 - DNA, 1830 bp, unidentified
  source 1..1830: mol_type = other DNA
  misc_feature 1..1830: note = Synthetic
atggtcacacacgcgatggaagaaccaaagacattcaacattccaactttcgtcttagacgaaaattgtaacttcatacccgaagttctctcacgcgccaacgctaaatatatcaaagatgtactcatccaagactcctacaatacggtttgtctcgcaaacagctttattcccatgacgattcaaaccgcagagcaaattatggttatcatcacaaagtttaagttttcacgtgcacgagatctgttcgaaaaagtactccgcctcggcgtacatataaacagattttatgccggaaaaaaacaagtcaaacatatgattacaatgatgaaaagtcttttcgacaccgaagaagccatgcgacgtctcgacagagctcttatggggctgtttgtcgatgctcgtggtagttcatatatgcctctcatagccttgtccttgcacgaaaacggccttccagattccaaattcacaaaagccgtcaaattaataaacacaaccttaaactcctttcataatcgaccggacgcagatatcgaacagtatgcacaaaaattacgagcatacaattacctctataaaataccccattatactttgaaagaagctgttgacgtttattccgaaaatcttaaagatctctctattggagttaataaaaagcccacattactgtttacttcttcagacgacgggtatttatctcatatttttaacgacatgctattcttaacttctacttggaatatgatttataactgcaaagtacaaatcaggcgtttgaccacttggatcaaatacgaaatcaactccatagtcgaagattgcgtattggtgggattccaacttccagatctaaaggacacaatactagatctagcggcactcacatcaaatatgaatctcgtcgacccagataaagaccttttttctcactacaagctcatactggaaaaactttttgaaatctctattttcgcgactaaggcaaatatttgcattttaccaaccttcataaagagtcacctaatagagttcgaggatgtcttaaaaagaagcaatgatgatgaagacctcaattatctgcttctgaaatctaacgattctgatgatgaatacgacgaagacaaactaccaatacaagtcgatccaggcagagtagacaacgtgcttacagattctaacttttttaacgtaaccgcagataatgctttctcgtctatagcgatcatgccaatttcttatgataagatcatagatgtggaagaaaatgtaattcaagtcctagaagttgagatgcagagcctctcagcagttgtctacggagcagttgcaaacaaatacggcttaagcctaccacaagtcatcaaaaggttaaatcaaaatgaaggacgggcctcttctcgtgcatcctccagccacagtacttctaccatcccatactcccccccgcaaagcggtcgctccactccaacttctatcctaaggcaaagagcaccaatacgttccaacagcagatcatcatcggtctctttctcacaagacgacgataatcgtagtcattactctgacgaaacaaatatcagtgattattcatatcccatggcagatctagatttagaagacgaagaacccatggaggaccatccacactcccctcaatcagcatcatctaacaactccatgtctcgtcgaagccgagctctacaaaacgaacaaagaagacgtacgcccacaatggccccaccatctccggcaagaggacaaaataatgcccgcctcagacgcagaaccagacgctcaacggaaacgaacgacgaaaggttataa

SEQ ID NO: 15197 - DNA, 60 bp, unidentified
  misc_feature 1..60: note = Synthetic
  source 1..60: mol_type = other DNA
atgtactcatccaagactcctacaatacggtttgtctcgcaaacagctttattcccatga

SEQ ID NO: 15198 - DNA, 1989 bp, unidentified
  source 1..1989: mol_type = other DNA
  misc_feature 1..1989: note = Synthetic
atgcacagagcatcagcaaattcgctgttgaactcggtttcgggatccatgatgtggcgaaaccaatcttccggcagacgcccctccaagcgtctttctgataacgaagccaccttatctacaatcaactctattttgggagccgaagacatgttaagcaaaaacttattatcgtatctacctccgaacaacgaagagatagacatgatttatccctcggagcagataatgacttttattgaaatgctacacggacacaaaaattttttcaaaggtcagacaatccacaacgctctccgagattccgccgtactgaaaaaacaaatagcctatggagtagcgcaagcccttttaaacagcgtttccattcaacaaatccacgatgaatggaaacgtcatgtgaggtcatttccgttccacaacaaaaaattgtcatttcaagattattttagcgtatgggcccacgcgattaaacaggtgatcttgggtgatatatctaatataattaattttattcttcagagcatagacaacagtcactataacagatatgtagactggatctgtactgtaggaatcgttccgttcatgagaaccacccatacggccccgaacttatacaatctcctacaacaagtgtcatctaaactaatccacgacatagtgcggcataaacaaaacattgtaactcccgttttactgggtctatcttccgtgatcattccggattttcacaatattaagattttccgagaccgaaattcggagcagatttcttgttttaaaaacaagaaggctatagcgtttttcacgtacagcaccccatatgttattagaaatcgcttaatgctgactacgcccctcgcccacctttctccagaactaaaaaaacacaatagtctgcggcgtcatcaaaaaatgtgccaattattgaatacatttcccataaaggtgctaaccacagcaaagacagatgtaaccaacaaaaagataatggacatgatagaaaaagaagagaaaagcagcgacgcgaaaaaaagtttaatcaaatttttactcaacttatcggacagcaaatctaaaataggcattagggacagcgttgaaggatttattcaagaaatcactccctctataatagaccaaaataaactcatgttgaaccgaggacagttccgaaaacgctctgcgatcgacacaggagagagagacgttcgagatctgttcaaaaaacaaatcatcaagtgcatggaggagcagatacaaacacagatggatgaaatcgaaacactcaaaacaacaaaccaaatgttcgaaaggaaaatcaaggatctacactccttgctcgagacgaataacgattgtgatcgctataacccgaatctggaccatgacctcgagaatctctctttatctcgagcgctaaacatagttcaaaggctcccattcactagcgtttccatagatgacacccgatcagtcgcgaacagttttttttcacagtatatcccagacacgcaatatgccgacaaacgaatagaccagctatgggaaatggaatacatgcgaaccttccggttaagaaaaaacgttaataatcaaggacaggaagaaagtatcacatactctaactatagcatcgagctgctcatcgtgcctttcctaaggcgattcttaaacatttacaacctcgaatcgattcccgaagaatttctctttctatccctcggtgaaatcttattagccatctacgaaagcagcaaaatcaagcattatttaagactcgtatacgtccgagagctaaatcagatatcagaagtgtttaatttaacccaaacgcaccccgaaaacagcgaaccgattttcgattcgaacattttctccccaaacccggagaatgaaatccttgaaaaaattaaaagaattagaaacctcagacgtattcaacatcttacacgtccgaactatcctaaaggtgatcaagattga

SEQ ID NO: 15199 - DNA, 33 bp, unidentified; identical to SEQ ID NO: 8125
  source 1..33: mol_type = other DNA
  misc_feature 1..33: note = Synthetic

SEQ ID NO: 15200 - DNA, 24 bp, unidentified
  misc_feature 1..24: note = Synthetic
  source 1..24: mol_type = other DNA
atgactttatcagatcaaaattaa

SEQ ID NO: 15201 - DNA, 33 bp, unidentified; identical to SEQ ID NO: 8125
  source 1..33: mol_type = other DNA
  misc_feature 1..33: note = Synthetic

SEQ ID NO: 15202 - DNA, 27 bp, unidentified
  source 1..27: mol_type = other DNA
  misc_feature 1..27: note = Synthetic
atgtatttttttctgaatatattgtga

SEQ ID NO: 15203 - DNA, 30 bp, unidentified; identical to SEQ ID NO: 8128
  source 1..30: mol_type = other DNA
  misc_feature 1..30: note = Synthetic

SEQ ID NO: 15204 - DNA, 24 bp, unidentified
  misc_feature 1..24: note = Synthetic
  source 1..24: mol_type = other DNA
atgactttatcagatcaaaattaa

SEQ ID NO: 15205 - DNA, 27 bp, unidentified
  source 1..27: mol_type = other DNA
  misc_feature 1..27: note = Synthetic
atgtatttttttctgaatatattgtga

SEQ ID NO: 15206 - DNA, 63 bp, unidentified
  misc_feature 1..63: note = Synthetic
  source 1..63: mol_type = other DNA
ttggaccgttcgcctcctacgtgctctttgccttcatcacctgcatctgctgctgtagcatag

SEQ ID NO: 15207 - DNA, 48 bp, unidentified; identical to SEQ ID NO: 8145
  source 1..48: mol_type = other DNA
  misc_feature 1..48: note = Synthetic

SEQ ID NO: 15208 - DNA, 480 bp, unidentified
  misc_feature 1..480: note = Synthetic
  source 1..480: mol_type = other DNA
ctggtggtgaccaagtatactttgcactatttgatgcagatgatcaaaggtttggaggcaccggaatatggagtgtgcattttaaaaataaaactctttccgcccctagcagctctgcaagttccttctcccctcactccgggaagaactacgccaccgtttccagtcccaccgaaaacaccgtatcccaatcggaaagcccaggacgactccaaaaatcggaggtcggctctagtaccagtcccagggcgaaaacatctacagttcgacgacgacgagaaagagaatctacccccgaaggacaaccttccacctcaacaaagagaagaagaggaagaattggaggaggaggaggaggaggagctgaacgagctgtcccgtctcctgaccaagtggggtcgcgacatagatcggtttcaacaacgcatctgtcaagacttgcacgacttcagaaagaagcttgggatcccccagtcctaa

SEQ ID NO: 15209 - DNA, 60 bp, unidentified; identical to SEQ ID NO: 8147
  misc_feature 1..60: note = Synthetic
  source 1..60: mol_type = other DNA

SEQ ID NO: 15210 - DNA, 1833 bp, unidentified
  source 1..1833: mol_type = other DNA
  misc_feature 1..1833: note = Synthetic
atgatcacacacgcgatggaagggtcgaagacattcaacattcccactttcgtcttagacgaaaattgtaacttcatacccgatgttctctcacgcgccaacgctaaatttatcaaagaggtactcatccgagactcctacaatgcggtttgtcttgcaaacagctttattcccatggcgactcaaaccgtagagcaaattctgattattatcacaaagtttaagttctcacgttcacgagatctgctcatgtcagtatttcgcctcggcgtacatataaacagattttatgccggaaaaaatcaagtcaaacatatgatcacaatgatgaaaagtcttttcgataccgaagaagccatgcgacaactcgacagagctcttatggggctgtttgtcgatgctcgtgataattcatatatgcctctcatagcattgtccctgcacgaaaacggcttaccggattctaaattcataaaagccgtcagattaatacaaacaaccgtaaactcctttcataatcgaccggacgcagatatcgaacagtatgcagaaaaattacgagcatacaattacctctataaaatacccaagtattctctgaaagaagctgtcgacatttattccgataatcttaaagatctcactattggagtcaataaaaagcccaccttactgtttacgtcttcagatgacgcatatttatctcacatttacaacgacttactatttttaacttctacttggaatatgatttataattgcaaaaaagagataaggcgtttgaatacttggatcaaatacgaaattaactccataatggaaactgctgtattggtaggattccaacttccagatctgaaggaaacaattctagacctagcggcactcatatcaaatatgaatctcgtcagccccgataaagaacttttccctcactacaaactcatattagcaaaattgtttgaaatctgtatttttgcaactaaggcaaacatttgcattttaccatccttcataaagggtcacctaatagagttcgaggatgtcttaaaaagaagcaatgatgacgaagacctcaactatctgcttctgaaatctcgagattctgatgacgaatacgatgaagacaaacccccaatacaagtcgatccaggcagagtagacaacgtgcttacagattctgacttttttaacgtaaccccggaaaatgctttctcttctatagcgatcatgccaatttcttatgataagacgatagatgtggaagacaatgaaattcaagtcctagaggttgagatgcagagcctctcagcagttgtctacggagccgttgcaagcaaatacggcttaagcctggagcaagttatcagaaagttaaatcgaaatgaaggacggacctcttctcgtgcatcccccagccacagtacttctaccgtcccatactcccccccgcaaagcgatcgctccactccaacttctattctaagacaaagagtaccaatgcgttccaacagcagatcatcatcggtttctttctcacaggaagacagcaatcgtagtcattactctgacgaaacaaatattagtgattattcatatcccatggcagatctagaattagaagacgaagaacccatggaggaccatccgcactcccctcaatcaacatcatctaacaactccatgtctcgtcaaagccgagctctacaaaacggacaaagaagacgtgctcccacaatggtcccatcatctcagacacgaagacaaaataatgcccgccccagacgcgtagccaggcgcctaacggaaatgatgaacgacgcaaggttataa

SEQ ID NO: 15211 - DNA, 2145 bp, unidentified
  misc_feature 1..2145: note = Synthetic
  source 1..2145: mol_type = other DNA
ataacaattcatccaatggataaattggaactagtcaatgatggcctcaatattattgactttattcagaagaaccaaaaagaaatacagaagacatacggacgatcaagtattcaacaacccagcatcaaagatcaaacaaaagcctgggaagattttctgcagtgcaccagtggagaatctgaacaagttgaggggggaatgtctaaggatgatggagatgttgaaagaagaaacttggaggatctatccagtacttctcccacagatggaactattggaaagagagtgtcgaacacccgtgactgggcagaaggttcagatgacatacaactggacccagtggttacagacgttgtataccatgatcatggaggagaatgtaccggatatggatttacttcaagccctgagagagggtggagtgattacacatcaggagcaaacaatgggaatgtatgtcttgtatctgatgcaaagatgctgtcctatgctcccgaaattgcagtttctaaagaagatcgggaaactgatctagttcatcttgagaataaactatctactacaggactgaatcccacagcagtaccgttcactctgagaaacctgtctgatcctgcaaaagactctcctgtgattgctgaacactactacggactaggagttaaagagcaaaacgttggccctcagactagcagaaatgtcaatttggacagcatcaaattgtacacatcagatgacgaagaggcagatcagcttgaattcgaagatgagtttgcaggaagctcaagtgaagtgatagtcggcatttctcctgaagatgaagagccttcaagtgttggcggaaaacccaatgaatccattggacgtacaatcgaaggccaatcaatccgagacaaccttcaagccaaggacaacaaatcaacagatgtaccaggagcaggaccgaaagattcagcagtgaaggaagaaccaccccagaagaggctacctatgttagctgaagaatttgagtgctctggatcggaagacccaatcattcgggagctgctgaaggagaactcactcataaattgtcagcaagggaaagatgctcagcctccatatcattggagcatcgagaggtcaataagcccggataaaactgagatcgtcaacggtgctgtgcaaactgctgacaggcaaagaccaggaactccgatgccaaagtcccgaggtattcccattaaaaagggcacagacgcgaaatatccatctgctgggacggaaaacgtgcctgggtcgaagagtggtgcaacccggcatgttcgaggatcacccccctaccaagaaggcaagagtgtcaatgcggagaatgtccaactgaatgcttccactgcggttaaggaaactgataagtcagaagtaaaccccgtagacgacaacgactcacttgatgataaatacatcatgccttcagatgatttctcaaacactttcttcccgcacgacactgatcgcttgaattatcacgcagatcatttaggtgattatgaccttgaaaccctgtgtgaagagtcggttctaatgggagtgatcaactctataaaattaattaatctggatatgcgcttaaatcacattgaagaacaagttaaagagatcccaaagatcatcaataagcttgagtccattgacagagttctggccaagactaacaccgcactctcaaccattgaaggacacctggtttccatgatgataatgataccagggaaagggaaaggagaaagaaaggggaaaaataatcctgagcttaaaccagtgataggaagagacattctagagcagcaatctcttttttcttttgacaatgtcaagaatttcagagatggatcgttgacaaacgaaccgtatggggcagctgtacagttgagagaagatcttattcttcctgaacttaattttgaggagacaaatgcatctcaatttgttcctatggcagatgattcatccagagatgttatcaagacattgataaggactcacattaaagatagagagttgagatcagaactgattggttacctgaataaagcggaaaatgatgaggaaattcaggagatagcgaacactgtcaatgacatcattgacggtaatatttga

SEQ ID NO: 15212 - DNA, 1386 bp, unidentified
  misc_feature 1..1386: note = Synthetic
  source 1..1386: mol_type = other DNA
ataacaattcatccaatggataaattggaactagtcaatgatggcctcaatattattgactttattcagaagaaccaaaaagaaatacagaagacatacggacgatcaagtattcaacaacccagcatcaaagatcaaacaaaagcctgggaagattttctgcagtgcaccagtggagaatctgaacaagttgaggggggaatgtctaaggatgatggagatgttgaaagaagaaacttggaggatctatccagtacttctcccacagatggaactattggaaagagagtgtcgaacacccgtgactgggcagaaggttcagatgacatacaactggacccagtggttacagacgttgtataccatgatcatggaggagaatgtaccggatatggatttacttcaagccctgagagagggtggagtgattacacatcaggagcaaacaatgggaatgtatgtcttgtatctgatgcaaagatgctgtcctatgctcccgaaattgcagtttctaaagaagatcgggaaactgatctagttcatcttgagaataaactatctactacaggactgaatcccacagcagtaccgttcactctgagaaacctgtctgatcctgcaaaagactctcctgtgattgctgaacactactacggactaggagttaaagagcaaaacgttggccctcagactagcagaaatgtcaatttggacagcatcaaattgtacacatcagatgacgaagaggcagatcagcttgaattcgaagatgagtttgcaggaagctcaagtgaagtgatagtcggcatttctcctgaagatgaagagccttcaagtgttggcggaaaacccaatgaatccattggacgtacaatcgaaggccaatcaatccgagacaaccttcaagccaaggacaacaaatcaacagatgtaccaggagcaggaccgaaagattcagcagtgaaggaagaaccaccccagaagaggctacctatgttagctgaagaatttgagtgctctggatcggaagacccaatcattcgggagctgctgaaggagaactcactcataaattgtcagcaagggaaagatgctcagcctccatatcattggagcatcgagaggtcaataagcccggataaaactgagatcgtcaacggtgctgtgcaaactgctgacaggcaaagaccaggaactccgatgccaaagtcccgaggtattcccattaaaaaggggcacagacgcgaaatatccatctgctgggacggaaaacgtgcctgggtcgaagagtggtgcaacccggcatgttcgaggatcacccccctaccaagaaggcaagagtgtcaatgcggagaatgtccaactgaatgcttccactgcggttaa

SEQ ID NO: 15213 - DNA, 1365 bp, unidentified
  source 1..1365: mol_type = other DNA
  misc_feature 1..1365: note = Synthetic
ataacaattcatccaatggataaattggaactagtcaatgatggcctcaatattattgactttattcagaagaaccaaaaagaaatacagaagacatacggacgatcaagtattcaacaacccagcatcaaagatcaaacaaaagcctgggaagattttctgcagtgcaccagtggagaatctgaacaagttgaggggggaatgtctaaggatgatggagatgttgaaagaagaaacttggaggatctatccagtacttctcccacagatggaactattggaaagagagtgtcgaacacccgtgactgggcagaaggttcagatgacatacaactggacccagtggttacagacgttgtataccatgatcatggaggagaatgtaccggatatggatttacttcaagccctgagagagggtggagtgattacacatcaggagcaaacaatgggaatgtatgtcttgtatctgatgcaaagatgctgtcctatgctcccgaaattgcagtttctaaagaagatcgggaaactgatctagttcatcttgagaataaactatctactacaggactgaatcccacagcagtaccgttcactctgagaaacctgtctgatcctgcaaaagactctcctgtgattgctgaacactactacggactaggagttaaagagcaaaacgttggccctcagactagcagaaatgtcaatttggacagcatcaaattgtacacatcagatgacgaagaggcagatcagcttgaattcgaagatgagtttgcaggaagctcaagtgaagtgatagtcggcatttctcctgaagatgaagagccttcaagtgttggcggaaaacccaatgaatccattggacgtacaatcgaaggccaatcaatccgagacaaccttcaagccaaggacaacaaatcaacagatgtaccaggagcaggaccgaaagattcagcagtgaaggaagaaccaccccagaagaggctacctatgttagctgaagaatttgagtgctctggatcggaagacccaatcattcgggagctgctgaaggagaactcactcataaattgtcagcaagggaaagatgctcagcctccatatcattggagcatcgagaggtcaataagcccggataaaactgagatcgtcaacggtgctgtgcaaactgctgacaggcaaagaccaggaactccgatgccaaagtcccgaggtattcccattaaaaaggcacagacgcgaaatatccatctgctgggacggaaaacgtgcctgggtcgaagagtggtgcaacccggcatgttcgaggatcacccccctaccaagaaggcaagagtgtcaatgcggagaatgtccaactga

SEQ ID NO: 15214 - DNA, 498 bp, unidentified; identical to SEQ ID NO: 13608
  source 1..498: mol_type = other DNA
  misc_feature 1..498: note = Synthetic

SEQ ID NO: 15215 - DNA, 498 bp, unidentified; identical to SEQ ID NO: 13608
  misc_feature 1..498: note = Synthetic
  source 1..498: mol_type = other DNA

SEQ ID NO: 15216 - DNA, 498 bp, unidentified; identical to SEQ ID NO: 13608
  misc_feature 1..498: note = Synthetic
  source 1..498: mol_type = other DNA

SEQ ID NO: 15217 - DNA, 621 bp, unidentified
  misc_feature 1..621: note = Synthetic
  source 1..621: mol_type = other DNA
ataggaatcatgggaaattgctttgtaaaaaaaatctcttctgacatcttcaactctaactaccagatgctctattctgagctctcagagcaagaggatttactggattttttagagacaaaatatacagattttggaattttaaaaaccgatattctcaactatgaaagagactccgaaacattcaaaactttgttgcaagtgttacctatctataaaaaaacaaagctgaggtataatttgattgaacgctgtttaaataattgtccccctcacgttaaagatgcattgattattgaaatcatgaaagctaagaaaattttagagactctggatgttgtgttcatgaaaattatgattggagaatttacaatttgcagtgacaatgtgaatcaattgctcaataaattttcaatagaccaaacaacattatgtgacatggaaaaaataaatactttaattgacttagacgaagaaaatagcaagcgtcttttgacagagatcgatcctttgttacatcaagaaacaggcctgtatcaagcgctgcctaatgcagttacggatccaccaagcgaacagagagccgcaactaaaaaatgttacgaaggatttaccaaataa

SEQ ID NO: 15218 - DNA, 105 bp, unidentified; identical to SEQ ID NO: 8157
  misc_feature 1..105: note = Synthetic
  source 1..105: mol_type = other DNA

SEQ ID NO: 15219 - DNA, 213 bp, unidentified; identical to SEQ ID NO: 12173
  source 1..213: mol_type = other DNA
  misc_feature 1..213: note = Synthetic

SEQ ID NO: 15220 - DNA, 24 bp, unidentified
  source 1..24: mol_type = other DNA
  misc_feature 1..24: note = Synthetic
ttggtgctaggacttcgttcttga

SEQ ID NO: 15221 - DNA, 90 bp, unidentified; identical to SEQ ID NO: 8162
  misc_feature 1..90: note = Synthetic
  source 1..90: mol_type = other DNA

SEQ ID NO: 15222 - DNA, 60 bp, unidentified; identical to SEQ ID NO: 8163
  misc_feature 1..60: note = Synthetic
  source 1..60: mol_type = other DNA

SEQ ID NO: 15223 - DNA, 33 bp, unidentified; identical to SEQ ID NO: 8164
  source 1..33: mol_type = other DNA
  misc_feature 1..33: note = Synthetic

SEQ ID NO: 15224 - DNA, 33 bp, unidentified; identical to SEQ ID NO: 8125
  source 1..33: mol_type = other DNA
  misc_feature 1..33: note = Synthetic

SEQ ID NO: 15225 - DNA, 24 bp, unidentified
  misc_feature 1..24: note = Synthetic
  source 1..24: mol_type = other DNA
atgactttatcagatcaaaattaa

SEQ ID NO: 15226 - DNA, 27 bp, unidentified
  source 1..27: mol_type = other DNA
  misc_feature 1..27: note = Synthetic
atgtatttttttctgaatatattgtga

SEQ ID NO: 15227 - DNA, 216 bp, unidentified
  source 1..216: mol_type = other DNA
  misc_feature 1..216: note = Synthetic
atgggggcccttaccgacctgggacagaacatgctctatgccaactcagcccatgcgctggacatgacttttgaggtggatcccatggatgagcccaccctgctttatcttcttttcgaagtcttcgacgtggtcagagtgcaccagccacaccgcggcgtcatcgaggccgtctacctgcgcacaccgttctcggccggcaacgccaccacataa

SEQ ID NO: 15228 - DNA, 168 bp, unidentified
  misc_feature 1..168: note = Synthetic
  source 1..168: mol_type = other DNA
atgagcccaccctgctttatcttcttttcgaagtcttcgacgtggtcagagtgcaccagccacaccgcggcgtcatcgaggccgtctacctgcgcacaccgttctcggccggcaacgccaccacataagaagcctcttgcttcttgcaagcagcagctgcagccatga

SEQ ID NO: 15229 - DNA, 222 bp, unidentified
  misc_feature 1..222: note = Synthetic
  source 1..222: mol_type = other DNA
atgtctatgggggcccttacagacttgggacagaatatgctctatgccaactcagctcatgctctggacatgacctttgaggtggatcccatggatgagcccaccctgctttatcttctcttcgaagttttcgacgtggtcagagtgcatcagccacaccgcggcatcatcgaggcagtctacctgcgtacaccgttctcggccggtaacgctaccacgtaa

SEQ ID NO: 15230 - DNA, 99 bp, unidentified
  misc_feature 1..99: note = Synthetic
  source 1..99: mol_type = other DNA
atcagccacaccgcggcatcatcgaggcagtctacctgcgtacaccgttctcggccggtaacgctaccacgtaagaagcttcttgcttcttgcaaatag

SEQ ID NO: 15231 - DNA, 60 bp, unidentified; identical to SEQ ID NO: 8169
  misc_feature 1..60: note = Synthetic
  source 1..60: mol_type = other DNA

SEQ ID NO: 15232 - DNA, 6330 bp, unidentified
  source 1..6330: mol_type = other DNA
  misc_feature 1..6330: note = Synthetic
atggattttgatctaatagaagattctgataactggggagatgatgagtcggactttttcctgcgagacattctatctcaagaagatcagatgtcttacttaaacaccgcagattataatttgaattccccgctcatttcagatgacatagtttatatagtgaaaagaatgaatcacgaagatgtcccccccatttggagatctaaagaatgggattctcctcttgatatgcttagaggttgtcaagctcaacccatgtctcatcaagagatgcacaattggtttgggacttggattcaaaatatccagcatgattctgctcaagggtttacattcttaaaagaagtggacaaagagtcagaaatgacctatgacttggtctcaacttttctgaaggggtgggttgggaaagattacccattcaagccaaagaacaaagaaattgatagtatggcattagtcggtcctctttgtcaaaaattccttgatttgcataaaatcactctgatattaaatgcagtttctttgggggaaactaaggaactcctcaccactttcaagggtaagtaccgcatgagttgtgaaaacattcctattgctcgcttaagacttccaagtctgggccctgtattcatgtgcaaaggttggacttatatccacaaagaaagagtactaatggaccgaaattttcttctcatgtgtaaagatgtaataataggacgcatgcagacatttttgtctatgatcggtcgatcagataacaaattcagtcctgatcaaatctacactctggcaaatgtataccggattggggataaaattctagaacaatgcggaaatagagcttatgatttgattaaaatgattgaacccatctgcaatttgaaaatgatggaattggctagagcgcatcgtcccaagattccaaagttccctcattttgaagagcatgtcaaaggctcagtgcgagaattaacacaaaggtccaatagaatacaaacattgtatgatttgatcatgtcgatgaaggatgttgacctcgtcttagtggtttacggatcattccgtcattggggtcatccattcattgattattttgaggggttggaaaaattgcacactcaggtgaatatggaaaagcatattgacaaggagtacccacagcaattagccagtgatttggccagacttgtgttaaataaacaatttagcgagtcaaaaaaatggttcgtggacccttcaaaaatgtctcccaaacaccctttttatgaacatgtcattaataagacatggcccacagcagccaaaattcaagactttggtgacaattggcacaagcttccattaattcaatgttttgaaatacctgatttaatagacccatcggtgatttattcagacaaaagtcattccatgaacaaaaaggaggtaatacagcatgttcggtcaaagccgaatgttccaatcccaagcaggaaagttctgcaaacaatgcttaccaatagggcaacaaactggaaagcctttctgaaagatatcgacgaaaatggaatggatgatgacgatttgataattggattaaagggaaaagaaagagaattgaaaatagctgggagattcttctcattgatgtcatggagattaagggaatattttgtgatcacggagtacttaatcaaaacatactacgttcccttgtttaaggggttaactatggcagatgacctcacatcggtgattaagaagatgatggacagttcatcaggtcaagggctcgatgattattcatcagtttgtttggctaaccatattgactacgagaagtggaataaccatcaaagaaaggaatctaatggtcccatcttcagagtcatgggacagtttctgggttatccatcactcatagagagaactcatgaattttttgagaaaagcttaatttattacaatgggcgtcctgatctaatgaccgttcgaaatggcacattgtgtaattccactaagcaccgggtttgttggaatgggcaaaaaggaggtttggaaggactaagacaaaagggatggagtattgtgaatctcttggttattcaaagggaagccaaaattcgaaacacagcagtgaaggtcttagcacagggagataatcaggttatatgcactcaatacaagacaaagaaaaccagatcagaattggaattaagagcagtcttacatcagatggcaggaaacaataataaaatcatggaagaaattaagagagggacagagaagttgggcctaatcataaatgatgatgagactatgcaatcagcagactatttaaattacgggaaaattccaattttccggggagtcataagaggactagaaacaaagagatggtcacgggtaacatgtgtcactaatgatcagatcccgacatgtgccaatttgatgtcctcagtctccaccaatgctttgactgttgctcattttgctgaaaatcccataaatgcaatgattcaatacaattattttggaacctttgcacgattactgctctttatgcatgatcctgcaatacggcaatccttgtacaatgtccaagaaaaaatacctggtttgcacaccagaacattcaagtacgccatgttatatctagatccttcaatcggaggagtatgtggtatggcattatctcggtttttaatcagagcatttcctgatccggtgacagagagtctctcattctggaagtttatctatgaacatgcgtctgagcctcatcttaaaaagatggcagtgatgtttggagaccccccaattgccaaattcagaattgaacacatcaacaaattgttagaagaccctacctctctaaacatctcaatgggtatgagtccagcaaatttattgaagagtgaagtcaaaaaatgtttaatagaatcaagatcatctatcaaaaatgaaatcataaaagatgctactatctatatgcatcaagaggaagagaagctgagaggatttttatggtctatcaaaccattattccctcgtttcctgagcgagttcaaagctggaacttttttgggagtatctgagggcttgataaatttattccaaaattcacgcactataagaaactcattcaaaaagagatatcacaaggatcttgatgaattaataatcaagagtgaaatatcttcattaagtcatctcggatccatgcattatcgattaggggataatcagatatggtcctgttctgcatctagagcagatgtgttaagatacaaatcttggaccaggaaggttgtaggaactacagtgcctcatcctttggaaatgcatggaccaccttcaaagaaggaaaaaccctgccatctgtgtaattcgtctggtcttacatatatttctgtgcattgtccaaaaggaattactgatgtatttaatcgaagaggacctttgccggcttacttgggatccaacacatctgagtctacctctattctacagccgtgggaaaaagagagtaaaataccaataatcaaaagagcaactagattgagggacgccatctcttggtttatcccacccgagtctcctctgtctacatgcatcttgaataatattcgggctctaacgggagaagattggagctctaaacagcatggctttaaacgaacaggatcagcattacatagattttccacctcccgtatgagcaatggaggatttgcctcacagagtccggccactttaactcgcatgattgccactacagatacaatgagagactttggtacgaagaattatgatttcatgttccaagcatctttgctatatgggcaaatgacaacaagtatttcaagatacggaaatccagggtcttgcacagaccattaccatatcagatgtaaggggtgcattagagagattgaagaagtagaattgaatactagtctagaatacaagacacccgatgtctatcacatactggaaaaatggaggaacaatactggatcgtggggtcatcaaatcaaacaattgaagcccgctgagggcaactgggaatcattgtctcctgtagagcaatcatatcaagttgcaagatgtattggatttctttatggtgaactgacacacaagaaatcaagacaggctgatgatagttctctatttcctttaagcattcaactaaaggtaagagggagaggtttcttgcgaggtctcctagacggtttaatgagatccagttgctgtcaggtaattcatagacgaagtgtttctaccttaaagagacctgcaaatgcagtctatggtggtctcatatacctcatcgataaattgagtgcatcaagtcccttcttatcacttgtaagaaccggacccattcgacaagaattagaacaggtgccacacaagatgtctacatcttatcctacgaacattagagatttgggttccattgtgagaaattattttaaatatcagtgtcgacctgtggagagaggacactataagacttattataatcaaatatggttattttcagatgttttgtccactgaatttatagggccaatggctatatctagctctcttcttaaactcctttaccgaccttccctgacaaagaaggatagagaggaattgagggagttagcagcactatcgtccaatttacgaagtggagaagattgggatgatttacatatcaaatttttctcaaatgatctcctcttttgttcacaggagataaggcatgcttgcaaatttggaattaaaaaggacaatgaagatatcactttttacccaaattggggaacagagtatattgggaatgtcattgatattcctgtgttttaccgagctcaaaatgtgcaaaaagatattaaagtacctcctcggatccagaatcctttgatgtcaggactcagacttggacaactgccaactggggctcattataagatgagaaccattgtatcccgtcttaaaatttcatatcatgattttctggcttgtggagatgggtctggaggaatgactgcagccctactccgacataatcggacatctagagggatatttaacagtttgttggatttgtcagacacaatgctaagaggatcttccccagaacctcccagtgcacttgagaccttggggggagagagagtccgatgtgtgaatggagacagttgctgggaacatccttctgatctaagtgatgagaacacatggaagtattttctccatttgaaaaagggatgtggaatgagtatcaatcttatcactatggacatggaagtccaagatcctgctatatcttatagaatcgaatcattggtcagacagtatgttccggttctattggaatctgatggttgccttatttataaaacatatggaacatatattgccacacaaaaagataattccctgactcttgtgggatcacttttccactctgttcaacttgtccaaacggatttaagctctagtaatacatctgaattgtatttagtgtgcaagagattgaaagattatgttgacacgccttttgttgattggatagaattatatgatcattgggaaaaacagtatgctttcaaaagcttcaaagatgaatttaacagagcccgttcacttacaccagagacaactctgataggaataccgcctcaatttataccagatcctggagtcaatctggaaaccctgtttcaaatagcaggagttccaaccggagttgcgcatggaatcacacatcacatattgcagtctaaggataaattgatatcaaatgccattggaagcatgtgtgttatttctcattttatcattaacacaatacggactacagatagcatgcctggacccccatcagatggggatgtcaacaaaatgtgttcagcattgattgggacatgtttctggttgagctggatggaatcagatcttaatttatataaaacttgtctaagatcaataatgaagtcgatgcctgtgagatggttcagagtattgaaaaatgagaaatggttgcaaaaatgggattgcaaaggagatgcagtcccgaaagattccagactcggagacagccttgctaatatcggcaattggataagagcttgggaattaattagggatgggaataagtctgagccttttgattcaatggtagcagaaacgttgacaaaatctgtggataaatcacttagctggaggaaaatctcaaagtcaaccggaattccaagacttttaaacagtgatgtcgatttagtggatcaatctatattgaacgttcagatcgacattgtagaaaatcaagcctggcaaaattga

SEQ ID NO: 15233 - DNA, 225 bp, unidentified
  source 1..225: mol_type = other DNA
  misc_feature 1..225: note = Synthetic
ataaaacaaaaaagctattatcaaatactgtacggaatggattcattctcttctctttttatgaaactctgttgtatatctactgataaaactggaagcaaaaaatctgatagaaagaataagaataagatcaaggattatatggaacacgattattataaaataacaatagttcctggttcctcttccacgtctactagctcgtggtattatacgcatgcctag

SEQ ID NO: 15234 - DNA, 1815 bp, unidentified
  source 1..1815: mol_type = other DNA
  misc_feature 1..1815: note = Synthetic
atgatggctgattccaaattggtaagcctgaacaataatctatctggtaaaatcaaggatcaaggtaaagttatcaagaattattacggcacaatggacatcaagaaaattaacgatgggttattagatagtaagatacttggggcgtttaacacagtgatagctttgttgggatcaatcatcatcattgtgatgaatatcatgataattcaaaattacaccagaacgactgataatcaggcactaatcaaagagtcactccagagtgtacagcaacaaatcaaagctttaacagacaaaatcgggacagagataggccccaaagtctcactaattgacacatccagcaccatcacaattcctgctaacatagggttactgggatccaagataagtcagtctaccagcagtattaatgagaatgttaacgataaatgcaaatttactcttcctcctttaaagattcatgagtgtaatatctcttgtccgaatcctttgcctttcagagaataccgaccaatctcacaaggggtgagtgatcttgtaggactgccgaaccagatctgtctacagaagacaacatcaacaatcttaaagcccaggctgatatcctatactctaccaattaataccagagaaggggtttgcatcactgacccacttttggctgttgataatggcttcttcgcctatagccatcttgaaaagatcggatcatgtactagaggaattgcaaaacaaaggataataggggtgggtgaggtattggataggggtgataaggtgccatcaatgtttatgaccaatgtttggacaccacccaatccaagcaccatccatcattgcagctcaacttaccatgaagatttttattacacattgtgcgcagtgtcccatgtgggagatcctatccttaacagtacttcctggacagagtcactgtctctgattcgtcttgctgtaagaccaaaaagtgatagtggagactacaatcagaaatacatcgctataactaaagttgaaagagggaagtacgataaggtgatgccttacggtccatcaggtatcaagcaaggggatacattgtactttccggccgtcggttttttgccaaggaccgaatttcaatataatgactctaattgtcccataattcattgcaagtacagcaaagcagaaaactgtaggctttcaatgggtgtcaactccaaaagtcattatattttgagatcaggactattgaagtataatctatctcttggaggagacatcatactccaatttatcgagattgctgacaatagattgaccatcggttctcctagtaagatatacaattccctaggtcaacccgttttctaccaggcatcatattcttgggatacgatgattaaattaggcgatgttgataccgttgaccctctaagagtacagtggagaaataacagtgtgatttctagacctggacagtcacagtgtcctcgatttaatgtctgtcccgaggtatgctgggaagggacatataatgatgcttttctaatagaccggctaaactgggttagtgctggtgtttatttaaacagtaaccaaactgcagagaaccctgtgtttgccgtattcaaggataacgagatcctttaccaagttccactggctgaagatgacacaaatgcacaaaaaaccatcacagattgcttcttgctggagaatgtcatatggtgtatatcactagtagaaatatacgatacaggagacagtgtgataaggccaaaactatttgcagtcaagatacctgcccaatgttcagagagttga

SEQ ID NO: 15235 - DNA, 75 bp, unidentified; identical to SEQ ID NO: 8176
  misc_feature 1..75: note = Synthetic
  source 1..75: mol_type = other DNA

SEQ ID NO: 15236 - DNA, 75 bp, unidentified; identical to SEQ ID NO: 8176
  misc_feature 1..75: note = Synthetic
  source 1..75: mol_type = other DNA

SEQ ID NO: 15237 - DNA, 174 bp, unidentified
  source 1..174: mol_type = other DNA
  misc_feature 1..174: note = Synthetic
atagaattctcaagcaaattctggccttactttacactaatacacatgataacaacaataatctctttgctaatcataatctccatcatgattgcaatactgaacaaactctgtgaatataacgtattccataacaaaacctttgagctaccaagagctcgagtcaatacatag

SEQ ID NO: 15238 - DNA, 36 bp, unidentified; identical to SEQ ID NO: 8179
  misc_feature 1..36: note = Synthetic
  source 1..36: mol_type = other DNA

SEQ ID NO: 15239 - DNA, 45 bp, unidentified; identical to SEQ ID NO: 8180
  misc_feature 1..45: note = Synthetic
  source 1..45: mol_type = other DNA

SEQ ID NO: 15240 - DNA, 51 bp, unidentified; identical to SEQ ID NO: 8181
  source 1..51: mol_type = other DNA
  misc_feature 1..51: note = Synthetic

SEQ ID NO: 15241 - DNA, 2130 bp, unidentified
  misc_feature 1..2130: note = Synthetic
  source 1..2130: mol_type = other DNA
aagatggataaagttttaaacagagaggaatctttgcagctaatggaccttctaggtcttgaaaggagtgcctgggggaatattcctctgatgagaaaggcatatttaaaaaaatgcaaggagtttcatcctgataaaggaggagatgaagaaaaaatgaagaaaatgaatactctgtacaagaaaatggaagatggagtaaaatatgctcatcaacctgactttggaggcttctgggatgcaactgagattccaacctatggaactgatgaatgggagcagtggtggaatgcctttaatgaggaaaacctgttttgctcagaagaaatgccatctagtgatgatgaggctactgctgactctcaacattctactcctccaaaaaagaagagaaaggtagaagaccccaaggactttccttcagaattgctaagttttttgagtcatgctgtgtttagtaatagaactcttgcttgctttgctatttacaccacaaaggaaaaagctgcactgctatacaagaaaattatggaaaaatattctgtaacctttataagtaggcataacagttataatcataacatactgttttttcttactccacacaggcatagagtgtctgctattaataactatgctcaaaaattgtgtacctttagctttttaatttgtaaaggggttaataaggaatatttgatgtatagtgccttgactagagatccattttctgttattgaggaaagtttgccaggtgggttaaaggagcatgattttaatccagaagaagcagaggaaactaaacaagtgtcctggaagcttgtaacagagtatgcaatggaaacaaaatgtgatgatgtgttgttattgcttgggatgtacttggaatttcagtacagttttgaaatgtgtttaaaatgtattaaaaaagaacagcccagccactataagtaccatgaaaagcattatgcaaatgctgctatatttgctgacagcaaaaaccaaaaaaccatatgccaacaggctgttgatactgttttagctaaaaagcgggttgatagcctacaattaactagagaacaaatgttaacaaacagatttaatgatcttttggataggatggatataatgtttggttctacaggctctgctgacatagaagaatggatggctggagttgcttggctacactgtttgttgcccaaaatggattcagtggtgtatgactttttaaaatgcatggtgtacaacattcctaaaaaaagatactggctgtttaaaggaccaattgatagtggtaaaactacattagcagctgctttgcttgaattatgtggggggaaagctttaaatgttaatttgcccttggacaggctgaactttgagctaggagtagctattgaccagtttttagtagtttttgaggatgtaaagggcactggaggggagtccagagatttgccttcaggtcagggaattaataacctggacaatttaagggattatttggatggcagtgttaaggtaaacttagaaaagaaacacctaaataaaagaactcaaatatttccccctggaatagtcaccatgaatgagtacagtgtgcctaaaacactgcaggccagatttgtaaaacaaatagattttaggcccaaagattatttaaagcattgcctggaacgcagtgagtttttgttagaaaagagaataattcaaagtggcattgctttgcttcttatgttaatttggtacagacctgtggctgagtttgctcaaagtattcagagcagaattgtggagtggaaagagagattggacaaagagtttagtttgtcagtgtatcaaaaaatgaagtttaatgtggctatgggaattggagttttagattggctaagaaacagtgatgatgatgatgaagacagccaggaaaatgctgataaaaatgaagatggtggggagaagaacatggaagactcagggcatgaaacaggcattgattcacagtcccaaggctcatttcaggcccctcagtcctcacagtctgttcatgatcataatcagccataccacatttgtagaggttttacttgctttaaaaaacctcccacacctccccctgaacctgaaacataa

SEQ ID NO: 15242 - DNA, 528 bp, unidentified
  source 1..528: mol_type = other DNA
  misc_feature 1..528: note = Synthetic
aagatggataaagttttaaacagagaggaatctttgcagctaatggaccttctaggtcttgaaaggagtgcctgggggaatattcctctgatgagaaaggcatatttaaaaaaatgcaaggagtttcatcctgataaaggaggagatgaagaaaaaatgaagaaaatgaatactctgtacaagaaaatggaagatggagtaaaatatgctcatcaacctgactttggaggcttctgggatgcaactgaggtatttgcttcttccttaaatcctggtgttgatgcaatgtactgcaaacaatggcctgagtgtgcaaagaaaatgtctgctaactgcatatgcttgctgtgcttactgaggatgaagcatgaaaatagaaaattatacaggaaagatccacttgtgtgggttgattgctactgcttcgattgctttagaatgtggtttggacttgatctttgtgaaggaaccttacttctgtggtgtgacataattggacaaactacctacagagatttaaagctctaa

SEQ ID NO: 15243 - DNA, 174 bp, unidentified
  source 1..174: mol_type = other DNA
  misc_feature 1..174: note = Synthetic
atagaattctcaagcaaattctggccttactttacactaatacacatgatcacaacaataatctctttgctaatcataatctccatcatgattgcaatactaaacaaactttgtgaatataacgtattccataacaaaacctttgagttaccaagagctcgagtcaacacatag

SEQ ID NO: 15244 - DNA, 51 bp, unidentified; identical to SEQ ID NO: 8188
  misc_feature 1..51: note = Synthetic
  source 1..51: mol_type = other DNA

SEQ ID NO: 15245 - DNA, 42 bp, unidentified; identical to SEQ ID NO: 1530
  source 1..42: mol_type = other DNA
  misc_feature 1..42: note = Synthetic

SEQ ID NO: 15246 - DNA, 228 bp, unidentified
  misc_feature 1..228: note = Synthetic
  source 1..228: mol_type = other DNA
atccgcattagtaacaacactttcattttttctgaaatgtgcgatctggccatgttcatgagcagacagtatgacctatggcctcccagcaaagagaacattgtggcattttccattgcttattgcttggtaacatgcatcatcactgctatcatttgtgtgtgcatacacttgcttatagttattcgccctagacaaagcaatgaggaaaaagagaaaatgccttaa

SEQ ID NO: 15247 - DNA, 228 bp, unidentified
  misc_feature 1..228: note = Synthetic
  source 1..228: mol_type = other DNA
ctgccgttttttcagatggctttgacttgccggtttcgcattcccgttccgtcctaccgaggaagatctcgccgtaggagaggcatggcgggcagtggccgccgacgcgctttgcgcaggcgaataaaaggcggatttttgcccgcgttgattcccatcatcgccgccgccataggcgcaatcccaggcgtggcctccgtggccttgcaagcagctcgcaaacaataa

SEQ ID NO: 15248 - DNA, 36 bp, unidentified; identical to SEQ ID NO: 8197
  source 1..36: mol_type = other DNA
  misc_feature 1..36: note = Synthetic

SEQ ID NO: 15249 - DNA, 135 bp, unidentified; identical to SEQ ID NO: 8198
  misc_feature 1..135: note = Synthetic
  source 1..135: mol_type = other DNA

SEQ ID NO: 15250 - DNA, 165 bp, unidentified
  misc_feature 1..165: note = Synthetic
  source 1..165: mol_type = other DNA
atatttccagctgtgattcccaagtcgcttgataacacgtggtctgcggactcgtcgtcagggaggcgctcggtggcagtagtagggggccctcgagcgctgccatggaggcgaccttggagcaacgacctttcccgtacctcgccacggaggccaacctcctaa

SEQ ID NO: 15251 - DNA, 36 bp, unidentified; identical to SEQ ID NO: 8197
  source 1..36: mol_type = other DNA
  misc_feature 1..36: note = Synthetic

SEQ ID NO: 15252 - DNA, 135 bp, unidentified; identical to SEQ ID NO: 8198
  source 1..135: mol_type = other DNA
  misc_feature 1..135: note = Synthetic

SEQ ID NO: 15253 - DNA, 4449 bp, unidentified
  source 1..4449: mol_type = other DNA
  misc_feature 1..4449: note = Synthetic
gtgggggctcgtccgggatacctacccctgccctctcgcattatgggacaaacctacggcctctcgtccagcccaatccccaaggcccccagggggttatcaacccaccattggttaaacttcctccaagccgcctaccggctacaacctgggccctccgactttgattttcagcaactacggcgtttcctgaagctggctcttaaaacacctatttggttaaatccaatcgattactccctcctagccagcctcatccccaagggttaccccgggcggacaatcgaaatcattaatgtgttaattaaaaatcaaacgtcccccaccccgcctcctgccccgtctctacccgaaccagctaacccaccgcccctccaacagccctcggctcctccggaaccccatacaccccccccctatataaagcctcccgctacccattgccttcccatactacacccacatggggccccctcggctcacagcccttggcaaatgaaagacctgcaggccatcaagcaggaggtcagcacctcagcccccgggagtccccagttcatgcaaacagtccggctcgcaattcagcaattcgaccccacggccaaagacttacaagatctcttgcagtacctctgctcctccctagtcgtctcccttcaccatcaacaattccataccctgattaccgaagctgaaacccggggaatgacaggttataaccccatggccgggcccctaaggatgcaggccaacaaccccgcccagcagggactccggagggaataccaaaacctctggctggcggccttttcagctctgccagggaacacccgcgacccatcctgggcagcaatcttgcaagggctagaggaaccctactgcgctttcgtagaacgccttaatgttgcccttgacaacggcctccccgaaggaacccccaaagagcccatcttgcgctccctggcctactccaacgctaataaagattgccaaaaattgctgcaggcccggggccatactaatagccccctaggggacatgctccgagcctgccaagcatggacacccaaggacaaagcccgggtcctcgtcgtccaaccacgaaagcccccgcccacgcagccctgcttccgctgcgggaaaacagggcattggagccgagactgcaccctcccacgccccccccctggtccgtgtcccttgtgcaaggacccttcccattggaaacgagattgtccacagttcaaaccccccccaacggaggaggaacccctcctgctggacctgccctcggatgccattgccaccgaggaaaaaaaactccctggggggggagatgtaatctccccccaacaaatctcaatgctccctgtcattccgttagagcaacagcaccagccccttctagacgttcaagtctccattgcaggcgccccccctcgacctacccaggcactcttagacacgggggctgatctcaccgtcctgccccaggcccttgcccccgagtcagtaagtgtttctgatacaacggttctgggcgctggcggacagaccagctcccagttcaaactccttcaatcccccctgtgcgtctacctacccttccggagggcccctgttaccctcccatcatgccttgtagacaccaatagcaaatgggccattattggccgtgatatcctccagaaatgccagagtgtcctgtaccttccggaggacaatctgtgcaagggtaccccccggctccccgatggaataactcctccccgattattacccgtgaccacccccaatgtcattggccttgagcacttcccaccacccccacagatagatcagttcccttttaaacctgagcgcctccaggccttgactgacctggtctccaaggccctggaggctagctacattgaaccttactctggaccaggtaataaccccgtctttccagtcaaaaaaccaaacggcaaatggagatttattcatgacctaagggccaccaatgccatcacgaccaccttggcctccccgtcccccggacctcccgatctcaccagcttatcaacagccctcccatacctgcaaactatagaccttactgacgccttcttccaaatcccccttccaaaacagttccagccatacttcgccttcaccatcccccagccatgtaattatggccctggggctcggtatgcctggactgtccttccacagggatttaaaaacagccccaccctgttcgaacaacagctggccgccgtcctttcccccatcaggaaaaccttccctatgtctactatcatccaatatatggatgatatactcttggccagtcctacacaagaggaactgcaacaactctccaagatgaccctccaagcgctagtcacccacggccttccagtctctcaggagaaaacccaacaaacccctgggcaaatacgtttcctgggtcaagttatatctcccaaccatattacctatgaaaccacccccaccattcccatcaaatcccaatggactctcactgaactacagactgtactaggagagattcaatgggtctcaaaaggaacccccattctccgcaaacacctgcagtgcttatactccgccctccgcggatatcaggaccccagggcacacctcctcctccagaagcaacagctccatgccctccatgccatccaacaggccttacaacacaattgccgcagccgtctcaatcctgctttgcccatcctggggcttatctccttgagctcgtctggcacaacctccgtcctcttccaagcccgacagcgatggcccctggtttggctgcacaccccccatcccccaaccagcctgtgcccctggggtcacttgctggcctgcactatcctgaccttggacaaatactccctccagcactatggccagctgtgccagtccttccaccataacatgtccaacacagctctccacgattttgtaaaaaactccccccacccgagcgtaggcatccttatccaccacatgggccgctttcacaacctcggcagtcaaccatctggtccttggaggactctcttacaccttcctgccctcctccaggagccacggctcctccgacccctcttcacgctatctcccgtggttttaacgacagcaccctgtctcttctccgacgggtcttctcaaaaggcggcttacgtgctttgggaccagaccatcctccaccatgactctgtcacgttgcccccccatggcagcaactcagctcaaaaaggagagcttctcgccctcctttcgggaatccgggcggccaagtcatggccatccctgaatatttttcttgactccaaatacttaattaaatatctccattcccttgccattggagcctttcttgggacttcaactcaccagtcactctatgcccatttgcctaccttgttacataacaaggttatttacctccaccatattcgtagccacaccaatctccccgaccccatctccactcttaacgaatacacagactcactcattatagcccctctcattcccctaacacctcaggatctgcataaacttacccattgcaactccagggcccttgtttcctcaggggccaccccacagcaagccaagtcactcttacaaacttgttacacctgcaacatcataaactcacaacatcacatgcctcaagggcacatccgtcgagggttgatgcccaatcacatatggcaaggagatgtaacccattacaaatacaagcggaaccgatattgcctgcacgtctgggttgataccttctccaacgcagtctccattacctgcaagacaaaagagactagttctgaaactgtcagcgccctcctgcacgctatcactatcttaggcaagcccctttctataaacactgacaatggttctgccttcctatctcaagaattccaggccttttgcgcctcatggcacatcaaacattccacccatgtgccttacaactctaccagctccgggctagtagaaaggaccaatggcattgttaaggccctcctcaacaaatatcttttagacagcccaaacctccccctagacaatgccatcagtaaagccctatggaccctaaaccaactcaatgtcatgtcgtcccagtggaaaacccgatggcaactccatcatggcccccggttgcgccccatccctgaaacacctcggccttctagggcacccacgaattggtactattacaaactccctggtcttaccaatcagcggtggaaaggacctttgcaatctctccaggaagctgcaggagcagccttactctcgatagacggctcccctcagtggatcccgtggcggctcctgaaaaagactgtatgcccaaggccagacggcagcgaactcgtcgcacacgcagcaacagaccaccaacaccatgggtaa

SEQ ID NO: 15254 - DNA, 66 bp, unidentified
  source 1..66: mol_type = other DNA
  misc_feature 1..66: note = Synthetic
aagccgcctaccggctacaacctgggccctccgactttgattttcagcaactacggcgtttcctga

SEQ ID NO: 15255 - DNA, 864 bp, unidentified
  misc_feature 1..864: note = Synthetic
  source 1..864: mol_type = other DNA
aagccgcagacgtatacagacggtgcctgcaccattgtgcccgctatgttaatgggactgggggtgcgcggggatgacgcgcgaatgacacctgggattcacgggctcctcctgaagatgctaaagaactggccgctttgcgctctgcgcgaggacgagctcaggtttttgcacctatccctgaccaagctgctgaccctaagtgttaacttttacctgtggcgggaagccgtgataaatactggaaaccgcacgaatcgtgtgctggcgcgcaaggtgccggatgaatactggtacctgctttaccgggccctggcccgggtgggcttcccggcagaggccctgcgccccggtaaccgctcacggtctctttgtctgtttttgcatgaccggcctgatgtcacaggggccgtctgtgcatgtgtgtgggcgcagcttggactgcgcagggcgccggacctgagccaggtcaccctggctgacggaaatctgctcttcaaccttggcagtgtcctccctaaccgcctggtggtgggtgtcctctactgccttgtccactggggtgcagacgagcatgaaacccgggttcgggcacgccttcgccccctcttcgtggccttcctctgcctggccggctatctgcttctggaccgtgccatcctctcggatgcgcacgactacgagggcctctggcacgccgtggccctgagcatggcggcctggcacggccttactcccctacccgaaacaagagacgagaaggaggcaaaacccccgtgcgatgactttatttacctttttgccaatgacccactccagtgcgaggaactggctcagcttggggccaccggggaggccaggtag

SEQ ID NO: 15256 - DNA, 867 bp, unidentified
  source 1..867: mol_type = other DNA
  misc_feature 1..867: note = Synthetic
acgaagccgcagacgtatacagacggtgcctgcaccattgtgcccgctatgttaatgggactgggggtgcgcggggatgacgcgcgaatgacacctgggattcacgggctcctcctgaagatgctaaagaactggccgctttgcgctctgcgcgaggacgagctcaggtttttgcacctatccctgaccaagctgctgaccctaagtgttaacttttacctgtggcgggaagccgtgataaatactggaaaccgcacgaatcgtgtgttggcacgcaaggtgccggatgaatactggtacctgctttaccgggccctggcccgggtgggcttcccggcagaggccctgcgccccggtaaccgctcacggtctctttgtctgtttttgcatgaccggcctgatgtcacaggggccgtctgtgcatgtgtgtgggcgcagcttggactgcgcagggcgccggacctgagccaggtcaccctggctgacggaaatctgctcttcaaccttggcagtgtcctccctaaccgcctggtggtgggtgtcctctactgccttgtccactggggtgcagacgagcatgaaacccgggttcgggcacgccttcgccccctctttgtggccttcctctgcctggccggctatctgcttctggaccgtgccatcctctcggatgcgcacgactacgagggcctctggcacgccgtggccctgagcatggcggcctggcacggccttactcccctacccgaaacaagagacgagaaggaggcaaaacccccgtgcgatgagtttatttacctttttgccaatgacccactccagtgcgaggaactggctcagcttggggccaccggggaggccaggtag

SEQ ID NO: 15257 - DNA, 867 bp, unidentified
  misc_feature 1..867: note = Synthetic
  source 1..867: mol_type = other DNA
acgaagccgcagacgtatacagacggtgcctgcaccattgtgcccgctatgttaatgggactgggggttcgcggggatgacgcgcgaatgacacctgggattcacgggctcctcctgaagatgctaaagaactggccgctttgcgctctgcgcgaggacgagctcaggtttttgcacctatccctgaccaagctgctgaccctaagtgttaacttttacctgtggcgggaagccgtgataaatactggaaaccgcacgaatcgtgtgttggcacgcaaggtgccggatgaatactggtacctgctttaccgggccctggcacgggtgggcttcccggcagaggccctgcgccccggtaaccgctcacggtctctttgtctgtttttgcatgaccggcctgatgtcacaggggccgtctgtgcatgtgtgtgggcgcagcttggactgcgcagggcgccggacctgagccaggtcaccctggctgacggaaatctgctcttcaaccttggcagtgtcctccctaaccgcctggtggtgggtgtcctctactgccttgttcactggggggcagatgagcatgaaacccgggttcgggcccgccttcgccccctctttgtggccttcctctgcctggccggctatctgcttctggaccgtgccatcctctcggatgcgcacgactacgagggcctctggcacgccgtggccctgagcatggcggcctggcacggccttactcccctacccgaaacaagagacgagaaggaggcaaaacccccgtgcgatgactttatttacctctttgccaatgacccactccagtgcgaggaactggctcagcttggggccacaggggaggccaggtag

SEQ ID NO: 15258 - DNA, 9216 bp, unidentified
  misc_feature 1..9216: note = Synthetic
  source 1..9216: mol_type = other DNA
gtggcggcgggcccccccagtgtgacgtccgtggagcgcaacatggggtgttcaactgatcaaaccatttgttctccagtcgtgggggccgactataatacctcctcgggctgccgggccttaaatgggagctaccactgcggtggtggctcttgccggtcaccaagtcgtgtgcaggtcgcgagacgagtcttgtggctgtgcgcattccttgcgctgatcggatccggtatgtgttcgatccggtccaaaactgaagggcgcattgagtcggggcaaatattgcagtctcagcgcgcatgttggactggtgagggttttgctttcttttctaactgttgcaatcaatctgatattatgtggtgtttgcaccgttggtgtgtgacaagacctggctgtttagtgtgcacgggcaatgccactcatcctgtctgctgggactatcttgggtccggtgtaagtcggcggcctgcgcgtcgaatgggtgagggagctgaagcgcttcttcgcttgatcggcattgcaggttggctcgggctgttagctgagactcttggtatgtccgaagtctatgcagctattctttgctttggatttattgcttggtatggctggggtatacctaaagcactggtgtgcacagtctgccctgcagtgaacatttctccctatagcttcttatctccagatactatcgcatttggtacgtggatactacaactacctggtcttttgtggcaaatgtttgtcagcttccctatactttacagcacttggattctttggttgttgctcagcggcaagactgttgctgtgatagcgatccttctggctagtcctacggttatggcatacaagcatcaatctgaaagctacctcaaatactgtaccataaccaatgcttcaacttctatgaactgtgactgcccctttggaacctttactcgcaatactgagtctcggttctctatacctagattctgtcctgttaaaactaatagctctacatttatctgctcatgggggtcgtggtggtggtttgctgagaacatcacgcgtccatactcggacgttggcatgccaccagcaccgatttccgctttgtgctatatctattcaaacaatgacccacctccttggtatcataacacaactatcatacctcagaactgtcgcaactctacggttgatcctgccacagctccatgccgtgacaagtggggcaatgcaactgcttgtattcttgaccgccggtcgcggttctgcggggactgctatggcggctgtttctatactaatggtagtcatgatcgatcctgggatcgatgcgggattggttaccgtgatggactcatagagttcgtgcagctcggtcagattcgacctaatatctcgaatacgaccattgagctcctcgctggcgcctcgcttgtgattgcatccggtcttcgggctgggtatggttgcagccgagcgcatggcgtggtgcactgctataggtgtccttcataccgtgaccttgaacagtttggtcccgggcttgggaaatgggtgccattgcctggcgagcctgtcccggagttgtgtattaaccctcagtgggcgaggcgcggcttccgggtgtctaacaatcctttaagcttgatgcagaccttcgttgaggacatttttctagcgcctttttgcaatccgacgcctggccgtgtacgtgtgtgtaacaatactgctttctatccgaaaggaggcggttttgtgcagctcatcggagacgtccaggtgctaacccctaacactgcatctttacactctctgctgactttaatatctcttgttttgttagtgtgtgttgtttctggcgcgcgattcgtcccattaatcatcatatttttctggagcgtgcgccacgtatatgcttcttgttacttaagctgtgattgggctgtttgcaacgatgcgttctgtttcacatctggcacttgtgctaccttcaatgacgtcttgtgtctgccggttgcgatgcgcatatcgtcctgtggccatgctgtgccgcctcccgaccgtggttgggaggtgcccgcggtgatgtcatgggcgatttcgcggactactggcttgacgttcgatgtcttttccttcgtccagtatcttcctactgtgcctggcaacaacaccgatatcatttactgtggtgaaccaaccttcttcggggacatcacgggcatctattggccttactttttgcctggcgtgttgctcttgtacttgactcccttcctgggtttaaggctaatgcttgccggcttcaatatagatggcttgtttcccgtacggcatgccacggctgcactgaggttctcgacttcgcgtgtgaccttgagtgtcgtacttgctttcctaatctatatattatctcaccctgttaatgctgcgctcaatagaatgttcctagcatctgcaaatttagagatgatcttatcctttgatacctatcatgagactgttctttacatcgtttgtctattgctctacctccaggtgtcgccccgtgcgggcttggccgctatggtggccatcaagctatctcgaggcctgttattcgctgtggtgttggcgcacggagtgtgccgacctgggcgggtatttggtcttgaggtttgcgcggacatctcttggttggtggagtttactggcaactgcacttggtacatgtcctgtgtcttctctttttggtgcgcagtgtttgccttcaccagtccacttggacgacagtataagcttcagatctaccggtactgggcgcaggcctatgccagattcgtcctcgctgtcggttgtggtcctctcggacgagagttccatttccgcgcaagcgtgggcgtgctttggtgtggtgcttgcatgctctggccccttgagtgctctgaaatcagcttggtcttcattctgtgtgctctgacagtggacaccatagacacatggttagtagcgtgcttgtccgcagggccgagtgcgcgaagccttgcaactctggccgatgacatggcgcgcattggtgaccaccgggcgttgcgcgccgtgttgcgttgctttggatcacgtggcacatacatatacaaccacatgggccaggtctcagaacgggtggcgcaagcagtcagggatttcggcggttgcttggaaccagtcgtgttggaggagcccacctttactgaggtcgtggatgatacaatgagtttggtgtgtggacaattgcttggaggtaaacctgtggtggcccgctgcggcacgcgtgtcttggtgggacacctcaaccctgaagatctgccgcctggtttccagctgagtgctccggtggttattaccaaaccaagcattggtacgtggtccttccttaaggcaacactcacagggcgtgctgaaacaccgggatccggccagatcgtggtgttgtcttccctgacaggtcggtcaatgggtaccgcagtgaatggcacactgtatgcgaccggccacggtgctggtgcgcgtggcctagccacgtgcgctggtttgaggatgccactttacacggcgctatctgatgatgtcgtggcctattcttgccttccgggcatgagttccctggagccctgccgctgttcgccgagccgggtttgggtgatgaacaacaacggagggttggtgtgtggcagagtggagaatgacgacgtctgtttggactgtcccacgcacatagatcaactgcggggtgcttcggggtcaccggttttgtgtgatcacggtcatgcatacgcgttgatgctcggtggttactctaccagtggtatttgtgcgcgtgtccggatagttcagccatggcagaacgcctattcctcctcaggggggcaaggcggaatgcaggcgccagctgtgacaccaacatactctgaaatcacctactatgcccctactggttctggtaagtcaacaaaatatccagtggacctagtcaaacagggacacaaagtattggtccttttaccaagcgtggctgtcgtcaaaagtatggccccttacattagggagacatataacattagacctgaaattagagctggcacaggccctgacggtgtgacggtcatcactggtgagagcttggcgtacatgacctatggccgcttccttgtggatccggagacgaatctgcggggctatgccgtagtcatttgcgacgagtgccacgacacatcatccaccacgctactcggcattggcgcagtgcgcatgtatgccgagaaagctggagtgaggaccgttgtattcgccacagccactcctgctggcattcaagtacagccacatcccaacattgatgaatatttattgactgacacaggcgacgtggaattctacggcgccaaaatcaaattggacaacatcagaactggtagacatgctatcttttgtcactcgaaggccaggtgtgcggaactaacgcagcagctctccggccttggtgttcgtgcagtgagtttttggcgcggctgtgacatcaaaaccattcccgcctcagactctattgttgtagtgacaactgatgcattgtccacaggctacacaggaaactttgattcggtcatcgactgcgggtgttgcgtagagcaaactgtgacaattgacatggaccccacgttctccatctcggcccgagtggtgccatgtactgctgcattgcgtatgcagcggcgcggacgcaccggtcgtggcagaaggggagcgtactacacaaccactccaggagcagcaccctgcgtcagcgttcccgatgctaacgtctggcaagcagtggagggagccatggtcttttatgactggagtgctgccaggatacagcagtgcctggcggcataccatgatttagggtgtacaccacgcatcagttgtgacccacacactccagtgcgggtgatggacacactgagggcgtacctgcgcagacctgaggtgacgactgcagctctcgcaggagagcagtggccgctgctttacggtgtgcagttgtgcatctgcaaagagaccgaggcccacggtccagacgatggcatcaagtggaagtgcttactcaacaacagtaataaaacacccctgttgtatgccttagacaatcctacactggaattcactacccaacatgacttgactcgccgtatagccagcgctttatcgagcacagtgttcgtggaagcaggctacggccccatcctcctcgctggcgccgcattggctgcctccttcgcctttgcgggcgccactggagctttagtgccgtcggccgtttggagtgttgacaacgggcttgctggcgtgacccgtcccgacgcgacagacgagaccgcggcctacgcgcagcgcttgtaccaagcctgcgcagattcaggaattctcgccagcttgcagggtacggcgagtgcggcgctgagcaaactggccgatgccagtaagggtgctagtcaatatctggcaaccgcgcctccttcacccgcccccctggtacaggtgctgcagttcctcgagaccaactttagctccattgcatctttcggtctgctctgtgctggttgtcaggctggcgagtgcttcactgcgcttgccgggttggtgtccggtgctacagctggcttgggaggtgcccataagtggttgttagctattgcaggaacttggctagttagcctgcagactgggccccgtggcggcatggttgcgggcctctcggttctagcaggctgttgcatcggtagcgtcaccgggcttgacttcctgtttgggtgccttacaggttgggaagccgtggtcggtgctgcggttgcgacacagaaaatcttgtctggttcggctgatatgaccactctggtagatctcttacctgctctcttctcccctggtgccggcatagctggtatcgtgcttgtctttattctaagcaactcaagtgtaaccacgtgggctaatcggctgttgtccatgtgtgcaaaacaaaccatttgtgaaaactacttcttgactgagaaatttggccaacaattaagcaaactttccctgtggcgcgctgtgtaccattgggcgcaggcacatgaaggatacacacagtgcggtgtggtcagcgggatctggagctttgtcttgtgcattctacgagctgcgtgggattgggcggccaagcatgtgccacggttccgtgtgcctatgattggctgctcacctgcgtggtccgggcgctggcttggtactggcaccttgttgaccacctgtgggtgtggagaacgtgtatcccttcaatgcctttgctcaacgtctgacccaatactcagtgtgggccgttggtgtcggtgtagttggagtgttgggttcccattcaacccgactacgacagccaccggcactttacggccggacattagcgacgccactaaattgggtttccgatatggtgttgccgagatcgtggagctagagcggcggggcgacaaatggcatgtctgtgcagcatcatgttgcttggaccgagctagcgttgcatctgccgtgaaggccccaccggtcacggccaatagtatacctatcagtactttttctccaccacaaacttacaaactttctctctgttcttttgattcagtttgcatgtctactaacttatgtaacccagctaagaccctgagtgtgtgctcacaggaggctgttgagctgctggaagaaacagttgacacagcacaaataatgatgtgtaaaagtctggaggcgcgaagacgcgccgagtatgatgcatggcaagttcgccaagcagttggcgacgagtacacgcgtttggcagacgaggatgttgacacgacaacgtcggtgaaacccccggtggccagggctgctgtgggtagctcaacgttggatgatgttagcgtgctgactgtcttgcgcgagctcggcgaccaatgccaaaatgctatcaaatttgtagttcaggcggcttcacggtttgttccaccagtgcccaggccgcgcacgcgtgtctcgggtgtgttggagcgtgtgcgcatgtgcatgcgcaagccaccaatcaagtttgaggccactgcagtaccaattcataatataatcccagaagagtgtcacattgtgctacgctgtaccggctgtagtgaccaggccttgactgttccgtacggcacttgcactcagactttaatcaaacatttgactaacaaacacagccactacattccaaaacagaagatagaagaagacacagaagtaactgtcatttgcgccgtaccaacaacgcgcgcaagtaaactcatcactttcagagcaggtgatcgatcagtctcatgttgtcaccccttgcaaactcctattagggccctgcttctaaagtacgggttacctatcgggaagtggtccgactgcaacggcccccttggtgacgatgcccgagtctgtgacgtcaatggagtaacaacttatgaaccatgcatgcaatcctacagttggttccgaccgattgtggcaccaacaaccccacctttacctgtagctcggaccgtggctggcattttacgcgcagacacatcgcgcgtttacaccacaacggcggttgacgtctccgagcggcaggctaaggtcacaattgatcaaacgtcagccaaggtggatcggtgtttccgagacacatacaattgctgccttgctaaggcaaagaccttcaaacaatctggcatgtcatatgaggatgctgtgtcaaagatgcgcgcaaacactacgcgtgaccataacaatggcatcacttattcagatttggtctctggacgcgcaaaatctgccgttcagaaaattgtagatcaaatgcgcgctggagtatacgacgctccaatgcgcattatcccaaagcctgaagtgttccctcgagacaagtcaacacggaagccaccacggttcctctgtttccctgggtgcgccgcacgagtcgcggagaaaatgatcctaggcgatcctggcgcgataaccaagcacgtgctaggtgatgcctacgggtttgccactccgccgcatgagcgcgcgcgcctattggaacaatggtggaaccgcgcaacggagccacaagctatcgcggttgatgcgatctgctttgatagcaccatcacggcagaggacatggatcgtgaggccaacatcatggctgcagcgcatgcggaccctgagggtgttcacggcctatacaattattacaaaagaagccccatgtgtgatatcacaggaaaagttgtcggggtgcgttgctgtcgagcctcaggtacgcttacaacaagcagtggcaacacgcttacttgctacctcaaggttcgtgcagcttgcacgcgcgccggtattaaaccaattggcttactaattcatggagatgataccctcattatcacagaacgttgcgctcaagaaactctcgatgagttcagcaacgcacttgatgactatgggtttcctcacaccttccaggtgtctggggacctctcgtctattgagtgctgtagcgcacgtgtggacagcgtttgcctccggggaggtatgcgtcgcatgctcgtgccacaagctcgacgtgcgattgcacgcgttctcggggaaaagggcgatccactgggtgttatcagcagctatattgtcatgtatcctactgcggccgtgactgtctacgtgctattgcccctgttgtgcatgctcattcgaaatgagccatcgcagacggggacacttgtgacgctgacggtctacggtaacagtgtgagcgtgccggtgtggctgcttccaaccatcattgtaaatttacatggtcgtgacgcactacaggtagtccgtcacagtgcagcttccatggcggaactgtcgtcagcgttggccttctttggcatgagagggttgaactgctggaggcggagacgccgcgccatcaggactgatatgatcaagttgggcgggtggaatgcgaatttcgcgcagatgttgctgtggtcaccggaggtaagaacaccacagcccgaaccaaagggcatgtgtctcttgccatcggaactatgggagcgtccgtacgaaaatttgcatttgagcacgatcgaccgcaatcgtggtgctagtcgcttacggttttggttggttgctagtgctatactcgctctgctttgcttgtaa

SEQ ID NO: 15259 - DNA, 9216 bp, unidentified
  source 1..9216: mol_type = other DNA
  misc_feature 1..9216: note = Synthetic
gtggcggcgggcccccccagtgtgacgtccgtggagcgcaacatggggtgttcaactgatcaaaccatttgttctccagtcgtgggggccgactataatacctcctcgggctgccgggccttaaatgggagctaccactgcggtggtggctcttgccggtcaccaagtcgtgtgcaggttgcgagacgagtcttgcagctgtgcgcattccttgcgctgatcggatccggtatgtgttcgatccggtccaaaactgaagggcgcattgagtcagggcaaatattgcagtctcagcgcgcatgttggactggtgagggttttgctttcttttctaactgttgcaatcaatctgatattatgtggtgtttgcaccgttggtgtgtgacaagacctggctgtttagtgtgcacgggcaatgccacccatcctatctgctgggactatcttggatccggtgtaagtcggcggcctgcacgtcgaatgggtgagggagctgaagcgcttcttcgcttgatcggcattgcaggttggcttggactgttagctgagtcccttggtatgtccgaagtctatgcagctattctttgctttggatttattgcttggtatggctggggtatacctaaaacactggtgtgcaccgtctgccctgcagtgaacatttctccctatagcttcttatctccagatactatcgcatttggtacgtggatactacaactacctggtcttttgtggcaaatgtttgttagcttccctatactctacagcacttggattctttggttgttgctcagcggcaagactgttgctgtgatagcaatccttctggctagtcctacggttatggcgtacaagcatcaatctgaaagctacctcaaatactgtaccataaccaatacttcaacttctatgaactgtgactgcccctttggaacctttactcgcaatactgagtctcgtttctccatacctagattctgtcctgttaaaatcaatagctctacatttatttgttcatgggggtcgtggtggtggtttgctgaaaacatcacgcgtccatacacggacgttggcatgccaccagcaccgatttccgctttgtgctatatctattctaacaatgacccacctccttggtatcataacacaactatcatacctcagaactgtcgcaactctacggtggatcctaccacagctccatgccgtgacaagtggggcaacgcaactgcttgtattcttgaccgccggtcgcggttctgcggggactgctatggcggttgtttctatactaatggtagtcatgatcgatcctgggatcgatgcgggattggttaccgtgatggactcatagagttcgtgcagctcggtcagattcgacctaacatctcgaatacgaccattgagctcctcgctggcgcctcgcttgtgatcgcatccggtcttcggcctgggtttggttgcagccgagcgcatggcgtggtgcactgctataggtgtccttcataccgtgaccttgaacagtttggtcctgggcttgggaaatgggtgccattgcccggcgagcctgtcccggagttgtgtatcaaccctcagtgggcgaggcgcggcttccggatgtctaataatcctctgagcttgctacagaccttcgttgaggacattttcctagcgcctttttgtaatccgacgcctggccgtgtacgtgtgtgtaacaataccgctttctatccaagaggaggcggctttgtgcagctcatcggggacgtccaggtgctaacccctaacactgcatctttacactctctgctgactttgatatctcttatcttgttggtgtgtgttgtttctggtgcgcgattcgttccactaataatcatatttttctggagcgcgcgccatgtatatgcttcttgttacttaagctgtgattgggctgtttgcaacgatgcgttctgtttcacatctggcacttgtgccaccttcaatgacgtcttgtgtctgccggttgcgacgcgcatatcgtcctgtggtcatgctgtgccacctcccgaccgtggttgggaggtgcctgcggcgatgtcatgggtgatttcgcggactactggcctgacgttcgatgtcttttccttcattcagtaccttcctactgtgcctggcaacaacaccaatatcatttactgtggtgaaccaaccttcctcggggacatcacgggcatctattggccttactttttgcctggcgcaatcctcttgtacttgactcccttcctaggtttaaggttaatgcttgccggcttcaatatagatggcttgtttcccatacggcatgccacggctgcactgaggttttcgacttctcgtgtgaccttgtgtgtcgtagttgctttcctaatctatatattatctcaccctgttaatgctgcgctcaatagaatgttcttagcatctgcaaatttagagatgatcttatcttttgatacctatcatgagactgttctttatatcctttgtctattgctctacctccaggtgtcgccccgtgcgggcttggccgctatggtggccatcaagctatctcgaggcctgttattcgctgtggtgttggcgcacggtgtgtgccgacctgggcgggtatttggtcttgaggtttgcgcggacatctcttggttggtggagtttactggcaattgcacttggtacatgtcctgtgtcttctctttttggtgcgcagtgtttgccttcaccagtccacttggacgacactataagattcagatctatcggtactgggcgcaggtctatgccagactcgtcctcgctgtcggttgtggtcctctcggtcgagagttccatttccgtgcaagtgtgggcgtgctgtggtgtggagcttgcatgctctggccccgtgagtgctctgaaatcagcctggtcttcattctgtgtgctctgacagtggacaccatagacacatggttagtagcgtgcttgtccgcagggccgagtgcgcgaacccttgcaattctggccgatgacatggcgcgcattggtgaccaccgggcgttgcgcgccgtgttacgttgctttggatcacgcggcacatacatatacaaccacatgggccaagtctcggaacgggtggcgcaagcagtcagggatctcggcggttgcttggaaccagtcgtgttggaggagcccacctttactgagatcgtggatgacacaatgagtttggtgtgtggacaattgcttggaggtaaacctgtggtggcccgctgcggcacgcgtgtcttggtgggacacctcaaccctgaagatctgccacctggtttccagctgagtgctccggtggttattaccaggccaagcattggtacgtggtccttccttaaggcgacactcacagggcgtgctgaaacaccagggtccggccagatcgtggtgttgtcttccctgacaggtcggtcaatgggtaccgcagtgaatggcacactgtatgcgaccggccatggtgccggcgcgcgcggcctagccacgtgcgctggtttgaggacgccactttacacggcattatctgatgatgtcgtggcctattcttgccttccgggcatgagttccctagacccctgctgctgttcgccgagccgggtttgggtgatgaataacaacggagggttggtgtgtggcagagtggagaatgacgacgtctgtttggactgtcccacgcacatagatcaactgcggggtgcttcgggctcaccagttttgtgtgatcacggtcatgcatacgcgttgatgctcggtggttactctaccagtggtatttgtgcacgcgtccggacggtccggccatggcataacgcctattcctcctcgggggggcaaggcggaatgcaggcgccagctgtgacaccaacatactctgaaatcacctactatgcccctactggttctggtaagtcaacaaaatatccagtggacctagtcaaacagggacacaaagtattggtccttttaccaagtgtggctgtagtcaaaagtatggccccttatattaaggagacatataagatcagacccgaaattagagctggcacaggtcctgacggtgtgacggtcatcactggtgagaacttggcgtacatgacctatggccgcttccttgtggatccggagacgaatctgcggggctatgctgtagtcatttgcgacgagtgtcacgacacatcatccaccacgctactcggcattggcgcagtgcgcatgtatgccgagaaagctggagtgaagaccgttgtattcgccacagccacccctgctggcattcaagtacagtcacattccaacattgatgaatacttattgactgacacaggcgacgtggaattttacggcgccaaaatcaaaatggacaacatcagaactggtagacatgttatcttttgccactcgaaggccaggtgtgcggaactaacgcagcagctctccggccttggcattcgtgcagtgagtttttggcgcggctgtgacatcaaaaccattcccgcctcagactccattgttgtggtggcaactgatgcattgtccacgggctacacaggaaactttgattcggtcatcgactgcgggtgttgcgtggagcaaactgtgacaattgacatggaccctacgttctccatctcggcccgagtggtgccatgtactgctgcattgcgcatgcagcggcgcggacgtaccggtcgtggtagaaggggagcgtactacacaacttctccaggagcagcaccctgcgtcagcgttcccgatgctaacgtctggcaagcagtggagagcgccatggtcttttatgattggagtgctaccaggatacaacagtgcctggcggcataccatgatttggggtgcacaccacgcatcagctgtgacccacacactccagtgcgggtgatggacacactgagggcgtacctgcgcagacctgaggtgacgactgcagctctcgcaggagagcagtggccgctgctttatggtgcgcagttgtgcatctgcaaagagaccgaggcccacggtcctgatgatagcatcaagtggaagtgcttactcaacaacagtaacaaaacacccctgttgtatgccttagacaatcctacactggaattcacaacccaacatgacttgactcgccgtatagccggcgctctatcgagcacagtgttcgtggagacaggctacggccccatcctccttgctggcgccgctttggctgcctccttcgcctttgcgggcgccactggagctttagtgccgtcggctgtttggagcgttgaggtcaggcctgctggcgtgacccgtcccgacgcgacagacgagaccgcggcctacgcacagcgcttgtaccaagcctgtgcagattcaggaattttcgccagcttgcagggtacggcgagtgcggcgctgggcaaactggccgacgccagtaggggtgctagtcaatatctggcagccgcgcctccttcacccgcccccctggtacaggtgttgcagttcctcgagaccaactttagctccattgcatctttcggcctgctctgtgctggctgccaggctggcgagtgcttcactgcgcttgctggcttggtgtccggtgctacagctggcttggggggtgcccataagtggctattagctattgcaggaacttggctggttagcttgcagaccgggtcccgtggcggcatggttgcgggcctctcgattctagcgggctgttgcatcggtagtgtcaccgggcttgacttcctgtttgggtgccttacaggttgggaagccgtggtcggcgctgcggttgcgacacagaagatcttgtctggttcagctgatatgaccactctggtagatctcttacctgctcttttctcccccggtgccggcatagctggcatcgtgcttgtcttcatcttaagcaattcaagtgtaaccacatgggctaatcggctattatccatgtgtgccaaacaaaccatttgtgaaaactacttcttaagtgaaagatttggccaacaattaagcaaactttccctgtggcgctctgtgtaccattgggcgcaggcacgtgagggatacacacagtgcggcgtgatcagcgggatctggagcttcgccttgtgcattctacgcgctgtgtgggattgggcggccaagcatgtgccacggttccgtgtgcctatgattggctgctcacctgcgtggtgcgggcgctggcttggtaccggcaccttgttgaccacctgtgcgtgtggagaacgtgtgtcccttcagtgcctttgctcaacatctgacccacaactcagtgtgggccgttggtgtcggtgtagttggagtgttgggttcccattcaacccgactacgacaggcactggcaccttacggccggacatcagtgacgccaacaaattgggtttccggtatggcgttgccgacatcgtggagctagagcggcggggcgacaaatggcacgtctgtgcagcatcatgttgcttggaccgggccagcgttgcatccgctgtgaaggccccaccggtcacggctaatggtatacctattaatagcttttctccaccacaaacttattgcctatctctctgttcctttgatacagtttgcatgtctactaacttatgtaacccagctaagaccctgagtgtgtgccaagaggaggcggttgagctgctggaagagacagttgacacagcacaagtagtgatgagccaaaatctggcagcgcgtagacgcgctgagtatgatgcatggcaggttcgccaagcagttggcgacgagtacacgcgtttggcagacgaggatgttgacatgacagcgtcggtgaaacccccagtggccagggctgctgtgggtagctcaacgttggatgatgttagcgtgctgactgtcttacgcgaactcggcgaccagtgccaaaatgctatcaaatttgtagttcaggcggcttcacggtttgttccaccagtgcccaagccacgcacgcgtgtctcgggtgtcttggagcgcgtgcgcatgtgcatgcgcacgcctccaatcaagtttgaggccaccgcagtaccaattcataatataatcccagaagagtgtcatattgtgctacgctgtaccggctgttgtgaccaggccttgaccgttccgtacggcacttgctctctgactttaaccaaatatttgactaacaaacacagtcactatattccaaaagagaagatagaagaagacacagaaatagctgtcatttgcgccgtaccaacaaagcgcgcaagtaaacttatcactttcagagcaggtgaccgatcagtctcatgttgtcaccccttgcaaactcctattagggccctgcttcaaaagtatgggttacctattgggaagtggtccgactgcaacgggccccttggtgacgacgcccgagtctgtgacgtcaatggagtgacaacttatgaaccatgcatgcaatcctacaattggttccgatcgattgtggcaccaacaaccccacctttacctgcaacccggagcgtggctggcattttgcgcgcagacacatcgcgcgtctacaccacaacagcggttgatgtctccgagcggcaggctaaggtcacgattgatcaaaagtcagccaaggtggaccagtgtctccgagacacatacaattgctgccttgccaaggcaaagaccttcagacaatctggcatgtcatatgaggatgctgtgtcaaagatgcgcgcaaacaccacgcgtgatcataacaacggcatcacttatacagatttggtctctggacgcgcaaaacctgtcgttcagaaaattgtagatcagatgcgcgctggagtgtacgacgctccaatgcgcattattccaaaacctgaagtgtttccacgagacaagtcaacacggaagccaccacggttcatcgttttccctgggtgtgccgcacgagtcgcggagaaaatgatcctgggcgatcctggcgcgataaccaagcacgtgctaggtgatgcctacgggtttgccactccgccgcatgagcgcgcgcgcctactggaacaatggtggaaccgcgcaacggagccacaagctatcgcggttgatgcagtctgctttgatagcaccatcacggcagaggacatggatcgtgaggccaacatcgtggctgcagcgcatacggacccggaaggtgttcacggcctatacaattattacaaaagaagccccatgtgtgatatcacaggaaaagttgtcggggtgcgtagctgtcgagcctcaggtacgcttacaacaagcagtggcaacacgcttacttgctacctcaaggttcgcgcagcttgcacgcgcgccggcattaaaccaattggcttactaattcatggagatgacaccctcattatcacagaacgttgcgctcaggaaactctcgatgagttcagcaacgcgcttgatgactatgggtttactcacaccatgcaggtgtctggggacctctcgtctatcgagtgctgcagcgcacgtgtggacagcgtttgcctccggggaggtatgcgtcgcatgctcgtgccacaagctcgacgtgcgattgcacgcgttctcggggaaaagggcgatccactgggtgttatcagcagctatattgtcatgtatcctactgcggctgtgactgtctacgttctgatgcccctgttgtgcatgctcattcgaaatgagccatcgcagacggggacacttgtaacgttgacggtccacggtaacagtgtgagcgtgccagtgtggctgcttccaaccattattgcaaatttacatggccgtgacgcactacaggttgtccgtcacagtgcagcttccatggcggaactgtcctcagcgttggccttctttggcatgagagggttgaactgctggaggcggagacgccgtgccatcaggactgatatgatcaagttgggcgggtggaatgcgaatttcgcgcagatgttactgtggtcaccggaggtaagaacaccacagcccgaaccaaagggcatgtgtctcttgccaccggaactatgggagcgtccgtacgaaaatttgcacttgagcacgatcgaccgcaatcgtggtgctagtcgcttacggttttggttggttgctagtgctatactcgctctgctttgcttgtaa

SEQ ID NO: 15260 - DNA, 21 bp, unidentified
  misc_feature 1..21: note = Synthetic
  source 1..21: mol_type = other DNA
atgttgttcccgtcgtgttaa

SEQ ID NO: 15261 - DNA, 759 bp, unidentified
  misc_feature 1..759: note = Synthetic
  source 1..759: mol_type = other DNA
ataaccatggaacttttactatttgtaatgtcactcatattactaaccttctcgaaagcgatgcctcttttcgaccacaattctttctattttgaaaaacttgacgactgtatcgcagctgtaataaattgcacgagatccgaagtacctctattactagaaccaatctaccagcctccggtatataatgaagacgttatgtcaatactgctaaaacccccaacaaaaaaaaagccttttagccgtataatggtaaccaatgaattcctcagcgacttcttacttctgcaggataacccagagcaactacgcacattgtttgcgctgataggggacccagaatctcgggacaattggctaaactttttcaatggcttccagacatgttcgccttccgtcggaataacaacctgcatcagcgataactgtagaaaatatttgcctgaaagaattacgtacgtcaataacttttttgttgataacattgcaggtctcgagtttaacatttcagaaaacacagacagtttttacagcaacattggttttttattatacttggagaatcctgctacaggcatcacaaaaattatcaggttcccttttaactctttgactctctttgatacgattttgaattgtttaaagtatttccacttgaaaaccggagtagaattcgacctgctaaaacagatggaagcctacaattctaaactacctttccgaagttcccgccctacgattctgattagaaacacataa

SEQ ID NO: 15262 - DNA, 6573 bp, unidentified
  misc_feature 1..6573: note = Synthetic
  source 1..6573: mol_type = other DNA
  misc_feature 4645: note = n is a, c, g, or t
  misc_feature 724: note = n is a, c, g, or t
  misc_feature 4666: note = n is a, c, g, or t
atgggggcacaggtctcaactcagcgctccggttcccatgaaacgagcaacgtagcacgagacggatccaccatcaacttcaccaacataaactattacaaggactcctatgctgcttcagcggctaaacatgatttcacccaggatccgggtaaatttacacagcccgttcttgatgctcttcgcgaggctgtaccaccactacagtcacccagtgcagaggcatgtggctacagtgatagggtagcccaattgactgttggcaactccacaatcacgactcaggaggctgcaaatatcatagtatcttacgctgagtggccagagtactgccctgatacagacgccacagcggtagataagcccactcgccccgatgtgtcagtgaacagattctatactatgccggcaacattatgggagacagagtcaaaaggttggtattggaagttccctgacctgctcaatgagataggggtcttcggacagaacgcacagtaccactacttgtacagatcaggcttttgcattcacgtacaatgtaatgccagcaagtttcaccagggtgctctcctagtagctgtgatcccggaattcgttgttgctgagcaggacgccactcaaaaacctaatacagcaaaacaccccgctttagaagccacacaacctggaaagaaaggcagggcatttatacatccatacgttcttgattgtggagtaccgntgagtcaggctctagtgttcccccatcagtggataaatctgcgcaccaacaattgtgctacaattgtggttccttacatcaacgcattgccctttgattctgcaataaatcactccaatttttcactggctgtcgtaccagtgtgcccgttaaagtataacactggtgccaccccttcgataccgatcacaattacagttgctccactgtgctctgaattcgctgggctgcgccaggcagtgaaacagggcatcccggtggaaatgaagccaggtacaaatcaatttctaactactgatgatggaacttcagcgccaatactgccaggttttcaccccacaccagctatccacattcctggggaagttcacagtttgctggagttatgccaggtggaaactatgttggaagttaataatacaactagagcagtggaactcgaccggttaaggatacctgtgtccgcccagagcgcagtggacaccttgtgtgcagcgtttagagtggatcccggtagggatggaccatggcagtccactatggtcgggcaattatgcaggtactacacacagtggtcaggctccctgaagataacattcatgttcacaggctccttcatggctacaggaaagatgctggtcgcttacactcctccaggaggcgcccagccagctactcgagaactcgctatgttgggcacacatgtgatctgggattttggcttacagtcatcagtgacactagtgatcccttggataagcaacacacactatagggccgttgaaactgggggtgtatttgactactacacgaccggtgtggtgactatatggtatcaaacaaattttgtggtccctcctgacactcccactagcgcttacatcttggcatttggagcgggtcagaagaatttcactctcaagctgtgcaaagacactgacgagattacacaacaagcggtgttgcagggtgacggtatcgaagatgctataaccaacactgtaaatgccactataaacagagtgttggatcgaccgatttctcactcatccacagctgcaaacacccaggtgagtcaacactcaattgagacaggtcgcgtgcccgcacttcaagctgctgaaacgggtgcaacgtccaacgcatccgatgaaaatctaattgaaactaggtgtgtagtcaacaagaacagtgtggaggaagctagcttaaaccacttcttctcccgtgctgcattagttggcaaagtggagctaaatgacacagggacggctgctacagggttcaccaattggaatattgacataatggggtatgcgcagttgcggaggaaactagagatgttcacatacatgaggttcaatgctgaattcacttttgtggccaccactagggctgggcaggtgccgtctagggtgcttcagtacatgtacgtccccccaggggcgcctaagccagacggtagggaggcttttcagtggcagtcctcaaccaacccatcagtgtttagtaagatgacagaccctccgccgcaagtgtcagtaccatttatgtctcccgctagcgcttatcaatggttctacgacgggtatcccactttcggtgaacacaatggtgaagacagcctgcggtacgggcaatgcccaaacaacgcactgggcacattctcagtaaggtttgtcagtgaagagatcaccaacgagcggatcaccatcaggatttacatgaggctcaagcacatacgagcttgggttccacgaccgctcaggtctgaaccttacgtgctgaagaactttccaaattacactgccgttacccatgtcacagctaaccggcctagcatcaccaacacaggcaggtttgggcaacagtccggggccatatacgttggcagctatagagtagtgaacagacaccttgccactcacaatgattgggctaacttagtgtgggaagacagctccagagaccttttggtatcttcaaccaccggccaggggtgtgacaccattgctcgatgtaattgtcagaccggggtgtattattgcaactcccggaggaaacactatccagtcagtttttctaaacctagcctggtgttcgtcgaggccagcgagtattacccagccaggtaccaatcacacctcatgctggccgagggacactcagagcctggagattgtggtggtattctcaggtgtcagcacggtgtcgtgggaattgtatccactggagggaacggtcttgtggggtttgctgatgttagggacctgctttggcttgatgaagaagctatggagcagggagtatctgattacatcaaaggtctcggcgatgccttcggcacgggctttactgacgcagtgtctagggaggtggaagcattaaaaaaccacttgatcggttctgaaggggctgtcgaaaaaatcttgaagaatctggtgaaactaatttcagccttagttatagtcatcaggagcgattacgacatggtcactctcacggctacgcttgctctgatcgggtgccatgggagtccttgggcgtggattaaatcaaagacagcttccatcctaggtattcccatggcacaaaagcagagtgactcatggttaaagaagtttaatgacatggcaaatgctgcaaaagggctcgagtgggtctctaacaagattagcaagtttattgattggcttaaggagaagattattccagccgctaaggagaaagtcgagttcttaaacaacctaaagcaacttcctctgttagaaaatcaaatctccaatcttgagcagtctgctgcctcgcaagaggacctagaagctatgtttggcaacgtgtcgtacctagctcacttttgccgcaagtttcaaccactctatgcaactgaggctaagagagtctatgctttggagaaaagaatgaacaactacatgcagttcaagagcaaacaccgtattgaacctgtgtgtttgatcattaggggttctccaggaacagggaagtcacttgccacgggtattatagctagagccattgctgacaaataccactccagcgtctactcgcttcccccagacccagatcacttcgatgggtataaacaacaggtggtcacagttatggatgatctctgccagaatccagatgggaaagacatgtccctattttgtcaaatggtttctacagtggattttataccacctatggcatcgttagaggaaaaaggggtgtccttcacatctaagtttgtcattgcatcaactaacgctagtaacatcatagtccccactgtctcagactcagatgcaattcgcaggcgattttacatggactgtgacatagaagtgacagattcttacaagacagatctcggccggttggacgcaggcagggctgctaagctttgtacagagaacaacactgccaacttcaaaagatgcagtccactagtgtgcggcaaagccatccagctgagagacaggaagtccaaggtaagatacagtgttgatactgtggtgtcagagctagtcagggagtataacagtagatctaccattggaaacaccatagaggcactctttcaagggccccccaagttcagacccatacgaatcagcctcgaagagaggccagcaccagatgctattagtgacttgctcgccagtgttgatagtgaggaggtccgacagtactgcagggaacaagggtggataatcccagagacaccaactaatgtggaacggcacctcaatagagcagtcttagtgatgcagtccattgccactgtggttgcggttgtgtctcttgtctatgttatttacaagctgtttgccggattccaaggtgcttactctggagcacccaagcaagcactcaagaagcctgtgttaagaacagctacagttcaaggacctagcntggrcttcgccttgtcccttntaaggcgcaacatcagacaggtacagactgaccaggggcacttcaccatgctaggcgtacgagaccgcttagccatcttgccacgccactcacagccagggaaaaccatctggatagagcacaaattggttaacatactagatgcagctgaactggtggatgagcaaggtgttaatttagaacttacactggtgaccttggacactaatgagaagtttagggatatcactaagttcatcccagagacaatcactggagcgagtgatgcaacattagttatcaacactgagcacatgccctcaatgtttgtgccagtgggtgatgttgtgcaatatgggttcttgaatctcagtggtaaacctactcacagaaccatgatgtacaatttccccacaaaagcaggacagtgtgggggggtagtcacttcagttggcaaggtcattggaatccacattggcggaaatggacgccagggcttttgcgccggcttaaagaggagctactttgctagtgaacaaggagagatccagtggatgaaacctaacaaagaaactgggaggctgaatatcaatggtccaactcgaaccaaattagaacccagtgtgtttcatgatgtgtttgagggcaataaggagccggcagttctgaccagcaaagatcccaggttggaggttgatttcgaacaagccctgttctctaaatacgtgggaaacaccctacacgagcccgatgagtatgtgacacaagctgcccttcactacgcaaatcaactaaaacaactagacataaataccagtaagatgagcatggaggaagcatgctatggcacagagaatttggaggctattgatctgcacaccagtgctggatatccttatagtgctttgggcattaaaaagagggacattctcgatccagtcactagggacacctccaagatgaaactatatatggataagtatgggttggatttgccctactccacctatgtgaaggatgagcttaggtccctagataaaatcaagaagggaaaatctcgcttgattgaagccagcagtctaaatgactctgtctatcttagaatgacttttggccatctttatgaggtattccacgccaatccgggaactataactggatctgcggtggggtgtaatcctgacgtgttttggagcaagctgccaatcctactaccaggctcgctctttgcatttgactactcagggtacgatgcaagcctcagtcctgtgtggttcagagctctagaactggttctacgagagattggttactcggaggaggctgtgtcactcatagaagggattaatcacacccaccatgtgtatcggaacaagacatactgcgttcttggtgggatgccctcaggttgctctggcacttcaattttcaattccatgatcaacaacataatcattagaacccttttgattaaaacgttcaaaggaatagacttggatgaactgaacatggtggcttacggagatgatgtactggctagctacccattccccattgattgctcggaattggcgagaactggtaaggagtacgggctgactatgactcctgctgacaagtcaccctgctttaatgaagtcacctgggagaacgcaaccttcttgaagaggggttttctaccagaccaccagttcccttttttaatccaccccaccatgcccatgagggaaatccacgagtccattcgttggaccaaggacgcacgaaacactcaagaccacgtgcgttccctttgcttgttggcgtggcacaatggaaaggaggaatatgaaaaatttgtgagcacaatcagatcagttcccattggaaaagctttggcgataccaaattttgagaacttaagaaggaattggctcgaattgttttaa

SEQ ID NO: 15263 - DNA, 465 bp, unidentified
  misc_feature 1..465: note = Synthetic
  source 1..465: mol_type = other DNA
atggaaacaatcaaagcgttggagaaatttatggagttcgatcgccttcagaaagactgctctgataaactcgatagagagaaggagagacgcatgaaggctgaacgtgaaatcgctcgtaaaaactgcggaggtaacccatgcgaacgtgaattggaatctgaacgtagtaacgtgaagaggttggaatatcaactagatgctgagaaagaaaaagttaagttctacaaaagagaactagaacgtgatcggtatctttctagtagatatcttacctcttcttcagatccacatgagaaaccattaccaaattatacatttcctcgcattaaaaatgtatctccgttgacaactgaggctacaggttctgtagaagtagcacctccatccacagacgttaccgaaccgattagtgatgtgacaccatcggtggatgtcgaaccagaacatcccccagctttctga

SEQ ID NO: 15264 - DNA, 132 bp, unidentified; identical to SEQ ID NO: 3895
  misc_feature 1..132: note = Synthetic
  source 1..132: mol_type = other DNA

SEQ ID NO: 15265 - DNA, 747 bp, unidentified
  misc_feature 1..747: note = Synthetic
  source 1..747: mol_type = other DNA
atggatcccacccgaggtctgtgtgccctctccacgcacgacctggcaaaatttcacagtctccccccggctagaaaggcggcaggtaagcgagcgcaccttaggtgttactccaagctgctctctcttaagagctgggagcaactagcctcttttttgtctctgcccccgggacccacgtttacggactttagactatttttcgaagtcaccctgggtcggagaatcgcagattgcgttgtggtagctctgcagccttccccccggtgttatattgtagaatttaagacggccatgagcaacacggccaacccgcaaagcgttactcgcaaggcacagaggctagagggcaccgcccagttgtgtgactgtgccaattttcttcgcacgtcctgcccccccgtgctgggcagtcagggcctggaagtcttggcggcgttggtatttaaaaaccagcgatccctgagaacgctccaggtagagtttccagccctgggccaaaagaccctccccacctccaccaccggcctgctaaacctcctctcccgctggcaggatggcgctctccgggcacgtcttgatagaccccgcccgactgcccagggacacaggccccgaactcatgtgggccccaagccttcgcaactcactgcgcgtgtcccccgaagcgctcgagctggcagagcgggaggccgaaagggccaggtcggagcggtgggacaggtgtgcccaggtgctcaaaaatag

SEQ ID NO: 15266 - DNA, 747 bp, unidentified; identical to SEQ ID NO: 15265
  misc_feature 1..747: note = Synthetic
  source 1..747: mol_type = other DNA

SEQ ID NO: 15267 - DNA, 30 bp, unidentified; identical to SEQ ID NO: 8254
  misc_feature 1..30: note = Synthetic
  source 1..30: mol_type = other DNA

SEQ ID NO: 15268 - DNA, 288 bp, unidentified
  source 1..288: mol_type = other DNA
  misc_feature 1..288: note = Synthetic
atgaatcccaaacattggggaagagccgtatggaccattatttttatagtactttctcaagcgggtttagacggcaacatagaagcgtgtaaacgaaaactatatactatagtcagcacgcttccatgtcctgcatgtagacggcacgcgactatcgctatagaggacaataatgtcatgtctagcgatgatctgaattatatttattattttttcatcagattatttaacaatttggcatctgataccaaatacgcaatcgatgtgtcaaaggttaaacctttataa

SEQ ID NO: 15269 - DNA, 2001 bp, unidentified
  misc_feature 1..2001: note = Synthetic
  source 1..2001: mol_type = other DNA
atgctacgtacctgcgacataacccacataaaaaacaactatgaagcgatcatatggaaaggcgaaagaaactgctctacgatatctaccaaataccccaacagtgccatcttctataagaagcgttttataatgctcacgccagaactcgggtttgcccattcatataaccaacaggtaaaacctctatatacattctgtgaaaaacagcgacatcttaaaaaccgtaagcctcttactatactaccgagccttacgcgcaagctacaagaaatgaagttcttacccgcttccgacaaatcctttgaatcacaatacacagagtttctcgaatcctttaagattctatatcgtgaaccgctattcttgcaaatagatggttttatcaaagatttcagaaaatggatcaaaggagaattcaacgactttggagacacgcgcaaaatacaactggaaccatttcagaagaacattctcatacatgtaatctttttcatcgccgtcaccaaacttccggctttagccaatcgtgttatcaactatctgacccacgtgttcgacattgaattcgtaaacgaaagtactctgaatacgctgaaacaaaaaactaacgtattcctagtcccgagaagacatggaaaaacgtggttcatagttccaattataagttttttattgaaaaacattgaaggaatcagcatcggttacgtagcacatcaaaaacatgtatctcactttgtgatgaaagaagtcgagtttaaatgccgccgaatgtttccagaaaagacaatcacatgcctggataatgtaattacaatcgaccatcaaaatataaagagcacagcacttttcgccagctgctacaatacacacagtatacgcggacaaagcttcaatctacttattgtcgacgagagccactttataaagaaagacgcgttcagcacgattttaggtttcctgccccaagcatctaccaagatcctatttatatcttcgaccaattccggaaaccattcaacttcttttttaatgaagctgaacaactctccgtttgaaatgctctccgtagtttcttacgtatgcgaagatcacgcccatatgctaaacgaacgcggtaacgccacagcctgttcttgctaccgactccacaaacccaagttcatcagcattaacgccgaagttaaaaaaacggccaacctcttcctagaaggagctttcatccatgaaatcatgggcggagccacttgcaatgtgatcaacgacgttttaattacggaacaaggacaaaccgaattcgagtttttccgatacagcaccatcaataaaaatctaattccttttttaggtaaagatctgtacgtatacctagatcctgcctatacaggcaaccgccgtgcttctggcactggcatagcagcgataggcacctatctagatcaatatatcgtctacggcatggagcactactttctagaaagtttaatgacgagttccgacacagcaatagctgaatgtgccgcgcatatgatattgtcaatcctagacctacatcctttcttcacggaagtaaaaatcatcatagaagggaattccaatcaagcttctgccgtaaaaatcgcatgtatcataaaggaaaacatcacggctaataaatctatacaggtgacttttttccacaccccagaccagaatcagatagcacagccattttacctactcggtaaagaaaaaaaactagcagttgagtttttcatctcgaattttaattcaggaaacatcaaggcatcacaggaattgatatcgtttacaataaaaatcacctacgatcccgtagaatacgcactagaacaaatcagaaacattcaccagatctccgttaacaattacataacatacagcgctaaaaaacaagcctgttctgacgacttaattatcgccataattatggcgatttatgtgtgctctggaaacagttcagcctctttccgagagatctaa

SEQ ID NO: 15270 - DNA, 93 bp, unidentified; identical to SEQ ID NO: 8258
  misc_feature 1..93: note = Synthetic
  source 1..93: mol_type = other DNA

SEQ ID NO: 15271 - DNA, 60 bp, unidentified; identical to SEQ ID NO: 8259
  misc_feature 1..60: note = Synthetic
  source 1..60: mol_type = other DNA

SEQ ID NO: 15272 - DNA, 60 bp, unidentified; identical to SEQ ID NO: 8259
  misc_feature 1..60: note = Synthetic
  source 1..60: mol_type = other DNA

SEQ ID NO: 15273 - DNA, 999 bp, unidentified
  misc_feature 1..999: note = Synthetic
  source 1..999: mol_type = other DNA
atgttcaacgcggtcaaggccgatatgcccgatgacccgatgctcgcccgcaggtatgggcagtgtctggaactggcactggaggcctgccaggacacgcccgagcaatttaagctggtggagacgccactcaagagcttcctgctcgtgtccaatatcctcccccaggacaacaggccctggcacgaggcccggagctccggccgtgtggccgaggatgactatgacttctcgagcctggctttggagctcttgcccctcaacccccgtttaccagaagaatggcagtttggtggacaaggttggtcgagccggatggagccctctcagcctgaaatgggcatgggtctgtgttttgaggtgtttgatggggaccttatgcgaattgcgctggcctggaacaaagatgaggttataggtcaggccttgcaaatattggcccactcccaaacctggacctccctggtgcctgaagacccactcccttggatgtgggccctcttctacggccccaggtcccactgcgaagagcgtcactgcgtttacgctgcggcacggggcaaaaggggccctattctgctacccactgcggtttatacaccatgtgccaacatagaggcattcctggcacacctcaccaggtgtgtgtatgccctgtacttggacgtgcgtgactggaagggtgaggatatagctcctccctttgacgttagccgcctgaataaaatggcaaaacagctctgcctgctgcctcaggaacccttttgcatcactcgtgtgtgccttttgtgcttgctacataaacaaaacctaaacgctcagtataaaaggccggtggacacgtatgatccttgcctaattctaacgggagaggcagaaagatatatggtggacgctgtgggaaattaccgggaagcctccactggaactaccgtactctaccccacgtatgatctgggctccatagttgcggacatggtgacttatgaagatgagtag

SEQ ID NO: 15274 - DNA, 999 bp, unidentified
  misc_feature 1..999: note = Synthetic
  source 1..999: mol_type = other DNA
atgttcaacgcggtcaaggccgatatgcccgatgacccgatgctcgcccgcaggtatgggcagtgtctggaactggcactggaggcctgccaggacacgcccgagcaatttaagctggtggagacgccactcaagagcttcctgctcgtgtccaatatcctccctcaggacaacaggccctggcacgaggcccggagctccggccgtgtggccgaggatgactatgacttctcgagcctggctttggagctcttgcccctcaacccccgtttaccagaagaatggcagtttggtggacaagggtggtcgagccggatggagccctctcagcctgaaatgggcatgggtctgtgttttgaggtgtttgatggggaccttatgcgaattgcgctggcctggaacaaagatgaggttataggtcaggccttgcaaatattggcccactcccatacctggacctccctggtgcctgaagacccactcccttggatgtgggccctcttctacggccccaggtcccactgcgaagagcgtcactgtgtttacgctgcagcacggggcaagaggggccctattctgctacccactgcggtttatacaccatgtgccaacatagaggcattcctggcacacctcaccaggtgtgtgtatgccctgtacttggacgtgcgtgactggaagggtgaggatatagctcctccctttgacgttagccgcctgaataaaatggcaaaacagctctgcctgctgcctcaggaacccttttgcatcactcgtgtgtgccttttgtgcttgctacataaacaaaacctaaacgctcagtataaaaggccggtggacacgtatgatccttgcctaattctaacgggagaggcagaaagatatatggtggacgctgtgggaaattaccgggaagcctccactggaactaccgtactctaccccacgtatgatctcggctccatagttgcggacatggtgacttatgaagatgagtag

SEQ ID NO: 15275 - DNA, 1479 bp, unidentified
  misc_feature 1..1479: note = Synthetic
  source 1..1479: mol_type = other DNA
gtggctggagaagcgcagcgtcggcgagcgaaggtagaggagtccgtcatggacgacctacgggacacgctgatggcctacggctgcatcgccatccgagccggggacttcaacggtctcaacgactttctggagcaggaatgcggcacccggctgcacgtggcctggcccgaacgctgcttcatccagctccgttcgcgcagcgccctggggcccttcgtgggcaagatgggcaccgtctgttcgcaaggtgcttacgtctgctgtcaggagtacctgcacccctttggcttcgtcgagggtccgggctttatgcgctaccaactcatcgtgctcatcgggcagcgcggcggcatctactgctacgatgacctgcgcgactgcatctacgagctggcgcccaccatgaaggattttctgcggcatggctttcgtcactgcgaccacttccacactatgcgcgactaccagcggcccatggtgcagtatgacgactactggaacgccgttatgctctaccgcggcgacgtggagagcctgtcggccgaggtgaccaagcggggctacgcttcctacagcatcgacgaccctttcgatgagtgtcccgacacccatttcgccttctggacccacaacacagaggttatgaagttcaaggaaacatctttcagcgtcgtccgcgcgggcggcagcatccagaccatggagctcatgatccgtaccgtgccgcgcatcacctgttaccaccagttgttgggcgcgctgggccacgaggtgccagaacgcaaagagttcctcgtacgccagtacgtcttggtggacactttcggcgtcgtctacggctacgaccccgccatggacgccgtctaccgtctggccgaggacgtggttatgttcacctgcgtcatgggaaagaagggacaccgaaaccaccgtttcagcggccggcgtgaggccatcgtgcgtctggaaaagacacccacctgtcaacatcccaaaaaaacccctgaccccatgatcatgtttgacgaggatgacgacgacgagctgtcgctgcctcgaaacgtgatgacgcacgaggaggccgagagtcgcctgtacgacgccatcaccgagaacctgatgcactgcgtcaaactggtgacgacggactcgcccctggctacgcacctgtggccgcaggagcttcaggccctgtgtgacagcccagcactgtcgctgtgcaccgatgacgtggagggtgttcgccagaagctgcgagctcggacgggctcgttgcaccactttgaactctcttaccgctttcacgacgaggaccccgagacctacatgggcttcctctgggatatcccgtcctgcgaccgctgcgtgcgccgacggcgtttcaaggtgtgcgacgtcggtcgacggcacattattcccggcgccgccaacggcatgccgcccctcaccccgccacacgcctacatgaacaactga

SEQ ID NO: 15276 - DNA, 33 bp, unidentified; identical to SEQ ID NO: 2119
  source 1..33: mol_type = other DNA
  misc_feature 1..33: note = Synthetic

SEQ ID NO: 15277 - DNA, 10176 bp, unidentified; identical to SEQ ID NO: 11270
  source 1..10176: mol_type = other DNA
  misc_feature 1..10176: note = Synthetic

SEQ ID NO: 15278 - DNA, 1023 bp, unidentified
  source 1..1023: mol_type = other DNA
  misc_feature 1..1023: note = Synthetic
atgcaggctttaggaatcaagacagaacattttataattatgtgtctacttagcggacatgctgtttttaccctatggtataccgctcgtgtaaagtttgaacatgagtgtgtgtatgcaaccacggtgattaatggtggaccggttgtatgggggtcttataacaactctcttatatatgtaacgtttgtaaaccactcaacgtttttggatggcctatctggatacgattacagctgccgggaaaatctattatcaggagatactatggtaaaaaccgctatttctacacctttgcatgacaaaattcgaattgttctgggaacacgtaattgtcacgcttatttttggtgcgtgcagctaaaaatgattttttttgcatggtttgtatatggtatgtatttacaatttcgacgaatacgtcgtatgtttgggccattccgatcatcctgtgagttaatatcccccacatcatattcactgaattacgtaacacgggttatttcgaacattcttcttggttacccatatacaaagttggcaaggttgttatgtgatgtttccatgcgacgggatggtatgagtaaagtatttaatgctgaccctataagttttttatatatgcataaaggtgttacgttattgatgcttttggaggttatcgctcatatatcatctggatgtattgtgcttttaacgcttggcgttgcatatacaccatgcgcgttattataccccacatacattcggattctggcctgggttgttgtatgcacgctcgctatagtagagcttatatcttatgttagaccaaaaccaaccaaggataatcatttaaatcatatcaatacggggggaatacgtggtatatgcacaacatgttgcgctacagtaatgtccggccttgctataaaatgtttttatatcgtcatatttgctatagcagtggttatttttatgcattacgaacaaagggtgcaggtaagcttgtttggggaaagtgaaaactcccagaagcattaa

SEQ ID NO: 15279 - DNA, 42 bp, unidentified; identical to SEQ ID NO: 8270
  source 1..42: mol_type = other DNA
  misc_feature 1..42: note = Synthetic

SEQ ID NO: 15280 - DNA, 10182 bp, unidentified; identical to SEQ ID NO: 11268
  source 1..10182: mol_type = other DNA
  misc_feature 1..10182: note = Synthetic

SEQ ID NO: 15281 - DNA, 51 bp, unidentified; identical to SEQ ID NO: 8273
  source 1..51: mol_type = other DNA
  misc_feature 1..51: note = Synthetic

SEQ ID NO: 15282 - DNA, 51 bp, unidentified; identical to SEQ ID NO: 8273
  source 1..51: mol_type = other DNA
  misc_feature 1..51: note = Synthetic

SEQ ID NO: 15283 - DNA, 1794 bp, unidentified
  misc_feature 1..1794: note = Synthetic
  source 1..1794: mol_type = other DNA
gtgtctgtaattaaatcgcgggccctcatcccagagatggatcgggtagaatcagaagaacccatggatggattcgaatcgcccgtattctccgaaaatacatcttctaattccggatggtgttccgacgcattttccgattcgtacatcgcttataatccagcccttctgctaaaaaacgatttgttattttcagaattgttatttgcctcccacttaataaatgttccccgtgcaatagaaaacaacgtcacttatgaggcctcttcggcggtaggtgtggataatgaaatgacctcaagtaccactgaatttatagaagaaattggagacgttttggcgttagacagagcctgtttggtctgcagaacgcttgatttgtataaacgtaaatttggactgacaccggaatgggttgcggactacgccatgttatgtatgaaaagtctggcatccccgccctgtgcagttgtcacttttagcgctgcctttgaatttgtgtatcttatggatcgttactacctgtgccgttataacgttactttggttgggtcctttgccaggcgcacgctttccctgttagatatacaaagacatttttttttgcatgtatgttttcgtaccgatggagggttaccaggtatacgaccgccccccggtaaggaaatggccaacaaagtaagatattccaattactccttttttgtacaggcggtagttagggctgcattactatcgatcagcacgtctcgtttagacgaaaccgaaacgcgtaagtcattttactttaatcaggacggactgactggaggccctcaacctttagcggccgccttggctaattggaaagattgcgcgcggatggttgactgttcatcatcggaacatcgcacaagtgggatgattacctgcgcggaacgtgcattaaaagaggatatagagtttgaagatatattaatagacaaacttaaaaaatcgtcttacgtagaagcagcttggggttacgcagacttggctttattattactgagtggggttgctacttggaatgtagacgagcgtacaaattgtgctatagaaactcgcgttggatgtgttaaatcatactggcaggcgaaccggattgaaaactccagggacgttccaaaacaattttccaaatttacgagcgaggatgcctgtcccgaagtagcatttgggcctattttgttaactaccttaaaaaacgcaaagtgccgtggtcgcacgaataccgaatgcatgttatgttgtttattaaccatagggcactattggatcgctttgcggcagtttaaaagggatatattagcatactcagcaaataacacaagtttatttgactgtatcgaacctgtaatcaatgcatggagcctagataaccccattaaacttaaatttccatttaatgatgagggtcgattcataaccattgtaaaagcagcaggttccgaggccgtatataaacatttattttgcgatctcctatgcgctctctcggaattacagacaaaccctaaaattttatttgcccatcctacaaccgcggataaggaagtgttggagttatataaagcccaactggctgcacaaaacagatttgaaggtcgtgtatgtgctggcctgtggacattggcgtatgcatttaaagcctaccagatttttccacgcaaaccaaccgccaatgccgcattcatacgagatggaggacttatgcttcgacgacatgcaatatcgctggtctccctcgaacacaccctatcgaagtatgtctag

SEQ ID NO: 15284 - DNA, 2151 bp, unidentified
  misc_feature 1..2151: note = Synthetic
  source 1..2151: mol_type = other DNA
ctgattttgagaggggaaatcgggactaggatgcagttgctctgtgttttttgcctggtgttgctatgggaggtgggggctgccagcctcagcgaggttaagctgcacctggacatagaggggcatgcttcgcattacaccatcccatggaccgaactgatggcaaaggtcccaggccttagcccagaggcgctgtggagagaggcaaatgtcaccgaagatttggcgtctatgcttaaccgctacaagttaatttacaagacgtctggtacccttggtattgcgctggccgagcctgtcgatatccctgctgtctctgaaggatccatgcaagtggatgcatctaaggtccatcccggagtcattagcggcctgaattcccctgcctgcatgcttagtgccccccttgagaagcagctcttctactatattggcaccatgctgcccaacacgcggccacacagctatgtcttttatcagctgcgctgtcacttgtcttatgtggccctgtccatcaacggggacaagtttcagtacacgggggccatgacttctaaatttctgatgggcacctacaagcgagtgaccgagaagggagatgagcatgtgttgagcctggtctttggcaagacgaaggacctgccggatctgagggggccttttagttacccatccttaaccagtgcccaaagcggggactattccctggtgattgttacaacctttgtgcattatgccaactttcacaactactttgtacccaacctgaaggatatgttttcccgagccgtcaccatgacagccgccagctacgctcgctacgttctccagaaactggtcctgctggagatgaagggaggctgccgggagccggaactggacacggaaacgctgactaccatgtttgaggtttctgtggccttctttaaggtgggtcatgctgtgggtgagactggcaatggctgcgtggacctccgctggttggccaagagcttctttgagctgactgtcctgaaagacatcatcggcatatgttatggggccactgtcaagggcatgcaatcctacgggctggagcgcttggccgccatgctgatggccacggtcaagatggaggagctgggtcacctgactactgagaaacaggagtacgcgctgaggttagccaccgtcggctaccccaaggccggggtttacagtggcctcattggaggcgccacatctgtgcttctctcggcctacaaccgccacccccttttccagcccctgcataccgtgatgagagagaccctgtttatcggcagccacgtggtgctacgcgagttgcggctgaacgtgactacccaggggcccaaccttgccctataccaactgctgtccaccgccctgtgctcggccctagagattggggaggttttgcgggggctagccctggggacagagagcgggctcttctcaccgtgctacctcagcctacgatttgacctcacacgagacaagctgctgagcatggccccccaggaggcaacgctggaccaggcggccgtttcaaatgctgtggatgggtttcttgggcggctctctttggagcgagaagacagggatgcgtggcatctccccgcctacaaatgcgtggacaggctcgacaaagttctgatgattatcccgctcatcaatgtgacattcataatctctagtgaccgtgaggtccgaggctcggcgctatacgaggccagcaccacctatctcagcagctctctctttctctcccccgttataatgaataaatgttcgcagggtgctgtggctggggagccccgccagattccaaagatccagaattttaccaggacgcagaaatcctgcattttttgtggctttgccctgctcagttatgatgaaaaggaaggcctggaaactacaacctacatcacctcccaggaagtccaaaactccatcttgagctccaactactttgattttgacaacctccacgttcactatctgctgctgaccaccaacgggactgtcatggaaattgcgggcctgtatgaagaaagagcacacgttgttttggcaataatcctgtactttattgcttttgctctgggtatctttctggttcacaagattgttatgtttttcctttag

SEQ ID NO: 15285 - DNA, 2151 bp, unidentified
  source 1..2151: mol_type = other DNA
  misc_feature 1..2151: note = Synthetic
ctgattttgagaggggaaatcgggactaggatgcagttgctctgtgttttttgcctggtgttgctatgggaggtgggggctgccagccttagcgaggttaagctgcacctggacatagaggggcatgcttcgcattacaccatcccatggaccgaactgatggcaaaggtcccaggccttagcccagaggcgctgtggagagaggcaaatgtcaccgaagatttggcgtctatgcttaaccgctacaagttaatttacaagacgtctggtacccttggtattgcgctggccgagcctgtcgatatccctgctgtctctgaaggatccatgcaagtggatgcatctaaggtccatcccggagtcattagcggcctgaattcccctgcctgcatgcttagtgccccccttgagaagcagctcttctactatattggcaccatgctgcccaacacgcggccacacagctatgtcttttatcagctgcgctgtcacttgtcttatgtggccctgtccatcaacggggacaagtttcagtacacgggggccatgacttctaaatttctgatgggcacctacaagcgagtgaccgagaagggagatgagcatgtgttgagcctgatctttggcaagacgaaggacctgccggatctgagggggccttttagttacccatccttaaccagtgcccaaagcggggactattccctggtgattgttacaacctttgtgcattatgccaactttcacaactactttgtacccaacctgaaggatatgttttcccgagccgtcaccatgacagccgccagctacgctcgctacgttctccagaaactggtcctgctggagatgaagggaggctgccgggagccagaactggacacggaaacgctgactaccatgtttgaggtttctgtggccttctttaaggtgggtcatgccgtgggtgagactggcaatggctgcgtggacctccgctggttggccaagagcttctttgagctgactgtcctgaaagacatcatcggcatatgttatggggccacggtcaagggcatgcaatcctacgggctggagcgcttggccgccatgctgatggccacggtcaagatggaggagcttggtcacctgacgactgagaaacaggagtacgcgctgaggttagccaccgtcggctaccccaaggccggggtttacagtggcctcattggaggcgccacatctgtgcttctctcggcctacaaccgccacccccttttccagcccctgcataccgtgatgagagagaccctgtttatcggcagccacgtggtgctacgcgagttgcggctgaacgtgactacccaggggcccaaccttgccctataccaactgctgtccaccgccctgtgctcggccctagagattggggaggttttgcgggggctagccctggggacggagagcgggctcttctcaccgtgctacctcagcctacgatttgacctcacacgagacaagctgctgagcatggccccccaggaggcaatgctggaccaggcggccgtttcaaatgctgtggatgggtttcttgggcgtctctctttggagcgagaagacagggatgcgtggcatctccccgcctacaaatgcgtggacaggctcgacaaagttctgatgattatcccgctcatcaacgtgacattcataatctctagtgaccgtgaggtccgaggctcggcgctatacgaggccagcaccacctatctcagcagctctctctttctctcccccgttataatgaataaatgttcgcagggtgctgtggctggggagccccgccagattccaaagatccagaattttaccaggacgcagaaatcctgcattttttgtggctttgccctgctcagttatgatgaaaaggaaggcctggaaactacaacctacatcacctcccaggaagtccaaaactccatcttgagctccaactactttgattttgacaacctccacgttcactatctgctgctgaccaccaacgggactgtcatggaaattgcgggcctgtatgaagaaagagcacacgttgttttggcaataatcctgtactttattgcttttgctctgggtatctttctggttcacaagattgttatgtttttcctttag

SEQ ID NO: 15286 - DNA, 2151 bp, unidentified
  misc_feature 1..2151: note = Synthetic
  source 1..2151: mol_type = other DNA
ctgattttgagaggggaaatcgggactaggatgcagttgctctgtgttttttgcctggtgttgctatgggaggtgggggctgccagtctcagcgaggttaagctgcacctggacatagaggggcatgcttcgcattacaccatcccatggaccgaactgatggcaaaggtcccaggccttagcccagaggcgctgtggagagaggcaaatgtcaccgaagatttggcgtctatgcttaaccgctacaagttaatttacaagacgtctggtacccttggtattgcgctggccgagcctgtcgatatccctgctgtctctgaaggatccatgcaagtggatgcatctaaggtccatcccggagtcattagcggcctgaattcccctgcctgcatgcttagtgccccccttgagaagcagctcttctactatattggcaccatgctgcccaacacgcggccacacagctatgtcttttatcagctgcgctgtcacttgtcttatgtggccctgtccatcaacggggacaagtttcagtacacgggggccatgacttctaaatttctgatgggcacctacaagcgagtgaccgagaagggagatgagcatgtgttgagcctgatctttggcaagacgaaggacctgccggatctgagggggccttttagttacccatccttaaccagtgcccaaagcggggactattccctggtgattgttacaacctttgtgcattatgccaactttcacaactactttgtacccaacctgaaggatatgttttcccgagccgtcaccatgacagccgccagctacgctcgctacgttctccagaaactggtcctgctggagatgaagggaggctgccgggagccagaactggacacggaaacgctgactaccatgtttgaggtttctgtggccttctttaaggtgggtcatgccgtgggtgagactggcaatggctgcgtggacctccgctggttggccaagagcttctttgagctgactgtcctgaaagacatcatcggcatatgttatggggccactgtcaagggcatgcaatcctacgggctggagcgcttggccgccgtgctgatggccacggtcaagatggaggagcttggtcacctgacgactgagaaacaggagtacgcgctgaggttagccaccgtcggctaccccaaggccggggtttacagtggcctcattggaggcgccacatctgtgcttctctcggcctacaaccgccacccccttttccagcccctgcataccgtgatgagagagaccctgtttatcggcagccacgtggtgctacgcgagttgcggctgaacgtgactacccaggggcccaaccttgccctataccaactgctgtccaccgccctgtgctcggccctagagattggggaggttttgcgggggctagccctggggacggagagcgggctcttctcaccgtgctacctcagcctacgatttgacctcacacgagacaagctgctgagcatggccccccaggaggcaatgctggaccaggcggccgtttcaaatgctgtggatgggtttcttgggcgtctctctttggagcgagaagacagggatgcgtggcatctccccgcctacaaatgcgtggacaggctcgacaaagttctgatgattatcccgctcatcaacgtgacattcataatctctagtgaccgtgaggtccgaggctcggcgctatacgaggccagcaccacctatctcagcagctctctctttctctcccccgttataatgaataaatgttcgcagggtgctgtggctggggagccccgccagattccaaagatccagaattttaccaggacgcagaaatcctgcattttttgtggctttgccctgctcagttatgatgaaaaggaaggcctggaaactacaacctacatcacctcccaggaagtccaaaactccatcttgagctccaactactttgattttgacaacctccacgttcactatctgctgctgaccaccaacgggactgtcatggaaattgcgggcctgtatgaagaaagagcacacgttgttttggcaataatcctgtactttattgcttttgctctgggtatctttctggttcacaagattgttatgtttttcctttag

SEQ ID NO: 15287 - DNA, 162 bp, unidentified
  source 1..162: mol_type = other DNA
  misc_feature 1..162: note = Synthetic
atagctatctcgtctctcaacaaactacgaggattcaaaaagagagtcaatgtttttgaaactagaatcgtaatggataatgacgataacattctaggaatgttgttttcggatagagttcaatcctttaagattaacatctttatggcgtttttagactaa

SEQ ID NO: 15288 - DNA, 30 bp, unidentified; identical to SEQ ID NO: 8281
  misc_feature 1..30: note = Synthetic
  source 1..30: mol_type = other DNA

SEQ ID NO: 15289 - DNA, 156 bp, unidentified
  misc_feature 1..156: note = Synthetic
  source 1..156: mol_type = other DNA
atctcgtctctcaacaaactacgaggattcaaaaagagagtcaatgtttttgaaaccagaatcgtaatggataatgacgataacattctaggaatgttgttttcggatagagttcaatcctttaagatcaacatctttatggcgtttttagattaa

SEQ ID NO: 15290 - DNA, 45 bp, unidentified; identical to SEQ ID NO: 8283
  misc_feature 1..45: note = Synthetic
  source 1..45: mol_type = other DNA

SEQ ID NO: 15291 - DNA, 36 bp, unidentified; identical to SEQ ID NO: 8289
  source 1..36: mol_type = other DNA
  misc_feature 1..36: note = Synthetic

SEQ ID NO: 15292 - DNA, 60 bp, unidentified; identical to SEQ ID NO: 8259
  source 1..60: mol_type = other DNA
  misc_feature 1..60: note = Synthetic

SEQ ID NO: 15293 - DNA, 999 bp, unidentified
  source 1..999: mol_type = other DNA
  misc_feature 1..999: note = Synthetic
atgttcaacgcggtcaaggccgatatgcccgatgacccgatgctcgcccgcaggtatgggcagtgtctggaactggcactggaggcctgccaggacacgcccgagcaatttaagctggtggagacgccactcaagagcttcctgctcgtgtccaatatcctcccccaggacaacaggccctggcacgaggcccggagctccggccgtgtggccgaggatgactatgacttctcgagcctggctttggagctcttgcccctcaatccccgtttaccagaagaatggcagtttggtggacaagggtggtcgagccggatggagccctctcagcctgaaatgggcatgggtctgtgttttgaggtgtttgatggggaccttatgcgaattgcgctggcctggaacaaagatgaggttataggtcaggccttgcaaatattggcccactcccatacctggacctccctggtgcctgaagacccactcccttggatgtgggccctcttctacggccccaggtcccactgcgaagagcgtcactgtgtttacgctgcagcacggggcaagaggggccctattctgctacccactgcggtttatacaccatgtgccaacatagaggcattcctggcacacctcaccaggtgtgtgtatgccctgtacttggacgtgcgtgactggaagggtgaggatatagctcctccctttgacgttagccgcctgaataaaatggcaaaacagctctgcctgctgcctcaggaacccttttgcatcactcgtgtgtgccttttgtgcttgctacataaacaaaacctaaacgctcagtataaaaggccggtggacacgtatgatccttgcctaattctaacgggagaggcagaaagatatatggtggacgctgtgggaaattaccgggaagcctccactggaactaccgtactctaccccacgtatgatctgggctccatagttgcggacatggtgacttatgaagatgagtag

SEQ ID NO: 15294 - DNA, 564 bp, unidentified
  misc_feature 1..564: note = Synthetic
  source 1..564: mol_type = other DNA
atgaaccagcacaacgtggagtacctggccaagatcctgtgtctgaaggccgaggtcgcgcgaaacccgtacgtggtcgtcagcaaggagctcctgagtaggtacgacgtgcgcacgcgttacggagacctggtcacactggtgcgcgtgacacaccgcgtggacaacagcacgacggtcttccaggtcttcaacgaggcggccgtgtcctacacgccgctggagcacgactacggcgagcccattatcgtcacggccttcgcgctgcccgcgcacaacaagttccccgtgagcgcgctctacatcgacatggtcgcatccgacctctttccgcgctttgcgcgggtcgatcccgacactgcgaaggtcatcaccagcctgctcacgcccgaggaccggcgcaacgagcagcccgtgcgcctgccgcgcatgctggagacggaggtggtggccaagatcctgtaccacccgaaagtcccgctaaagatcgtgcgcttctacaagccgaacatgctcacaggagtggaactggcggaccgcgcggtggcggccgtgctcgagtag

SEQ ID NO: 15295 - DNA, 27 bp, unidentified
  misc_feature 1..27: note = Synthetic
  source 1..27: mol_type = other DNA
atgcattttccagggaatattctatga

SEQ ID NO: 15296 - DNA, 27 bp, unidentified
  misc_feature 1..27: note = Synthetic
  source 1..27: mol_type = other DNA
atgcattttccagggaatattctatga

SEQ ID NO: 15297 - DNA, 156 bp, unidentified
  source 1..156: mol_type = other DNA
  misc_feature 1..156: note = Synthetic
atctcgtctctcaacaaactacgaggattcaaaaagagagtcaatgtttttgaaactagaatcgtaatggataatgacgataacattctaggaatgttgttttctgacagagttcaatcctttaagattaacatctttatggcgtttttagactaa

SEQ ID NO: 15298 - DNA, 63 bp, unidentified; identical to SEQ ID NO: 8298
  source 1..63: mol_type = other DNA
  misc_feature 1..63: note = Synthetic

SEQ ID NO: 15299 - DNA, 39 bp, unidentified; identical to SEQ ID NO: 8299
  misc_feature 1..39: note = Synthetic
  source 1..39: mol_type = other DNA

SEQ ID NO: 15300 - DNA, 39 bp, unidentified; identical to SEQ ID NO: 8300
  source 1..39: mol_type = other DNA
  misc_feature 1..39: note = Synthetic

SEQ ID NO: 15301 - DNA, 114 bp, unidentified; identical to SEQ ID NO: 8301
  source 1..114: mol_type = other DNA
  misc_feature 1..114: note = Synthetic

SEQ ID NO: 15302 - DNA, 456 bp, unidentified
  source 1..456: mol_type = other DNA
  misc_feature 1..456: note = Synthetic
atggaccacgaaaagtacgtcttgtcgatgttcttggaggaagataactccttcttctcgttcgtcgccgcgctgtccgacgacgaggcgctcggcgccgtgcagtccgccgccgccctcctggacttcctgctctctgtggtggtccgcggcaaggagaagctcgccgccgcggggcaccactacgactccatcgcggacggacgcgcgcgcgccgcgttcgagttccgagacctgcgcgagctggcgcagctcttcgaccggcggccctgcggtgtccaggaccgcgtgcgtgtgcgcgacgggcccgcgcgcgccttcgtggacgcggcactggggctcatgcgcgagcgaggcttcgacggcgcgcaggctgcggagcgcgcgcgctacatcgcgccgaacgatctgcccgcgctgggggcaatatcggccacgctctcgccgggtctataa

SEQ ID NO: 15303 - DNA, 18 bp, unidentified
  source 1..18: mol_type = other DNA
  misc_feature 1..18: note = Synthetic
ttggtgttgaagtgttga

SEQ ID NO: 15304 - DNA, 1491 bp, unidentified; identical to SEQ ID NO: 12690
  misc_feature 1..1491: note = Synthetic
  source 1..1491: mol_type = other DNA

SEQ ID NO: 15305 - DNA, 456 bp, unidentified; identical to SEQ ID NO: 12853
  source 1..456: mol_type = other DNA
  misc_feature 1..456: note = Synthetic

SEQ ID NO: 15306 - DNA, 27 bp, unidentified
  source 1..27: mol_type = other DNA
  misc_feature 1..27: note = Synthetic
atggtcatgggtggcttcacaaggtaa

SEQ ID NO: 15307 - DNA, 81 bp, unidentified; identical to SEQ ID NO: 8309
  source 1..81: mol_type = other DNA
  misc_feature 1..81: note = Synthetic

SEQ ID NO: 15308 - DNA, 120 bp, unidentified; identical to SEQ ID NO: 8310
  misc_feature 1..120: note = Synthetic
  source 1..120: mol_type = other DNA

SEQ ID NO: 15309 - DNA, 60 bp, unidentified
  misc_feature 1..60: note = Synthetic
  source 1..60: mol_type = other DNA
atgaacgttgaaaaatctctattgtttaaaaggaatagcaggcatcgactattaaactaa

SEQ ID NO: 15310 - DNA, 21 bp, unidentified
  source 1..21: mol_type = other DNA
  misc_feature 1..21: note = Synthetic
atggaatatatgggatggtaa

SEQ ID NO: 15311 - DNA, 30 bp, unidentified
  misc_feature 1..30: note = Synthetic
  source 1..30: mol_type = other DNA
atactatccctccaggagaaagacagttaa

SEQ ID NO: 15312 - DNA, 21 bp, unidentified
  source 1..21: mol_type = other DNA
  misc_feature 1..21: note = Synthetic
atggaatatatgggatggtaa

SEQ ID NO: 15313 - DNA, 24 bp, unidentified
  misc_feature 1..24: note = Synthetic
  source 1..24: mol_type = other DNA
atcaccgtacgccgccggatatga

SEQ ID NO: 15314 - DNA, 54 bp, unidentified
  misc_feature 1..54: note = Synthetic
  source 1..54: mol_type = other DNA
atgatttatatagcgcttatgattatactatccctccaggagaaagacaattaa

SEQ ID NO: 15315 - DNA, 69 bp, unidentified; identical to SEQ ID NO: 4296
  source 1..69: mol_type = other DNA
  misc_feature 1..69: note = Synthetic

SEQ ID NO: 15316 - DNA, 105 bp, unidentified
  source 1..105: mol_type = other DNA
  misc_feature 1..105: note = Synthetic
atgttcaaaaccttcaggcaaataaacaattggcagctcagcaatttggttataattcttccctgcttgcaacgcaaattcaagcccagaaggatctcactctga

SEQ ID NO: 15317 - DNA, 105 bp, unidentified; identical to SEQ ID NO: 15316
  source 1..105: mol_type = other DNA
  misc_feature 1..105: note = Synthetic

SEQ ID NO: 15318 - DNA, 312 bp, unidentified
  source 1..312: mol_type = other DNA
  misc_feature 1..312: note = Synthetic
gtgtccaaaactgaaatcttagcttcagaacggaggacagcggaagaaacagccatgtgtcttgtggcgccgatgcagtgcggatgtgctagctgcgtgcgtatcctcgacgcgctgctctcggccatggaggcgctagtgcagatgaggctgctctccgaagaagaaaagacgagctgtgcgagccagtttctggaacttgcgatctttgctgtggaaaactgtaggggagggcggcaagctttgcttcaggcaagaggggagccagcctctctcggagaagtggccggcaaggggccagcggcagactaa

SEQ ID NO: 15319 - DNA, 483 bp, unidentified
  source 1..483: mol_type = other DNA
  misc_feature 1..483: note = Synthetic
atctcgatactcccactcatccccctgcggcagcaacagcaaccaattctaggggtccggatctccgttatgggacaaacacctcagcctacccaagcgctacttgacacaggagccgaccttacggttataccccagacactcgtgcccgggccggtaaagctccacgacaccctgatcctaggcgccagtgggcaaaccaacacccagttcaaactcctccaaacccccctacacatattcttgcccttccgaaggtcccccgttatcctttcctcctgcctcttagacacccacaacaaatggaccatcattggaagggacgccctacaacaatgccaggggcttctatacctcccagacgaccccagcccccaccaattgctgccaatagccactccaaacaccataggcctcgaacaccttcccccacctccccaagtggaccaatttcctttaaacctgagcgcctccaggccttaa

SEQ ID NO: 15320 - DNA, 39 bp, unidentified; identical to SEQ ID NO: 8324
  source 1..39: mol_type = other DNA
  misc_feature 1..39: note = Synthetic

SEQ ID NO: 15321 - DNA, 24 bp, unidentified
  source 1..24: mol_type = other DNA
  misc_feature 1..24: note = Synthetic
atgcctcttctgaaagattattaa

SEQ ID NO: 15322 - DNA, 468 bp, unidentified
  source 1..468: mol_type = other DNA
  misc_feature 1..468: note = Synthetic
atggtcgcgcgtggctttgtcggtgtgctttttgtagcaatgcgtgcgtgcgctgcgcgcggcgtgttttgtgtcgcgagtgtgcgcgcccccgtgctgtgttttgttctgtcgcttgctgtcccaagactctgccggcgcaatctcgcggtgacaggcagagcagttccggtctcatggtggccggccgccgggtaccttgaagaaatacgcgccttaaatggatttcatccgccgcaagtacctagtgcacaccatcgagcgcaacatggatttcctgcgcgcagaggtcgcggagaaggtggccaacttcgcgctgaaccacgtgctggcactgcgctacctggtggcgcagtttccgcgcgccgtgctgaccaaggacgtcttcgcgaacgtaaactttcacgtcttcctgcacgtggtgcgctgcgcacaggtttacgacgcggtgctgcgctcgtcctttga

SEQ ID NO: 15323 - DNA, 669 bp, unidentified
  misc_feature 1..669: note = Synthetic
  source 1..669: mol_type = other DNA
atgaggctccaactcccttttgcttacttgctccttttgttcctttccggcgttaatgggggcggatgggaccctcgttcccctcaaggacctgccccccgctggcgcggcccgcgtcgcggtcggtcaggtggctcccgccctcagggagccaatcagacctctgccacaccgctcacaacccgcgcatctgcgcctggcactgtccctgtccctgacgtcgaccagcgtggcactatcctccggcgtcaatacaatcttgcttcgtctccactttccctatctgtcgctggttcatctaatgctgtgctgtactctgcccctctctcccctttgctgcctttgcaggacgggactaatgcgcacatcatgtcaacggaggctagtaattatgctcaatacagggttgttgctgcaaccctgcgttttcgacctgtcgtgcctgcgtctgtcggtgggttttctataagcatgtctttttggccacagtccaacaatgttccaacatctgttgacatgaattctatcacatctactgacgtgcgcattgtctctcagcctggtatggccactgagcttgtgatcccaaaagagcgcctgcactatcgcaatcagggctggcgtagtgttgagactgcaaacacatcacaggaggaggcgacgtctggt

SEQ ID NO: 15324 - DNA, 630 bp, unidentified
  source 1..630: mol_type = other DNA
  misc_feature 1..630: note = Synthetic
atggcctgcggatcccaaaacggctccagcgagcaagagctcagagccattgtccaagacctgggttgcggaccctattttttgggaacctacgataagcgcttcccggggttcatggcccccgataagctcgcctgtgccattgtaaatacggccggacgtgagacggggggagagcactggttggctttcggttggaacccacgttctaacacctgctacctttttgatccttttggattctcggatgatcgtctcaaacagatttaccagtttgaatatgagggtctcctgcgccgcagcgctcttgctaccaaggaccgctgtattacgctggaaaaatctacccagaccgtgcagggtccccgttctgccgcctgcggacttttctgctgcatgttccttcacgcctttgtgcactggcctgaccgtcccatggacggaaaccccaccatgaaattgctaactggagtgccaaacaacatgcttcattctcctaaagtccagcccaccctgtgtgacaatcaaaaagcactctaccattttcttaatacccattcgccttattttcgctcccatcgtacacacatcgaaagggccactgcgttcgaccgtatggatgttcaataa

SEQ ID NO: 15325 - DNA, 48 bp, unidentified
  misc_feature 1..48: note = Synthetic
  source 1..48: mol_type = other DNA
aggcgtatctccatagagaaattagtggtaaaatggccaagaaaatag

SEQ ID NO: 15326 - DNA, 138 bp, unidentified
  source 1..138: mol_type = other DNA
  misc_feature 1..138: note = Synthetic
atgcgcacgacctcggcttgtacggactccgagcccgaggactctgcagggccatcgtgcgcgggcatggccttgtccatgtttgggcgcgcgaaatcggtgtcgtcgcttcttctgcgaacgaaagcttcctactag

SEQ ID NO: 15327 - DNA, 150 bp, unidentified; identical to SEQ ID NO: 8334
  misc_feature 1..150: note = Synthetic
  source 1..150: mol_type = other DNA

SEQ ID NO: 15328 - DNA, 18 bp, unidentified
  misc_feature 1..18: note = Synthetic
  source 1..18: mol_type = other DNA
ttggaggctgtgtattaa

SEQ ID NO: 15329 - DNA, 1437 bp, unidentified
  misc_feature 1..1437: note = Synthetic
  source 1..1437: mol_type = other DNA
atgcccggaacatgcaggaagaagatgagcacggccaaggtcaaggagaaagcgggcggcagttcgccgcgtgacgaaaaccacagtttggcccttgcggggctcgtgtccggactccttgtcttgggcgcgatctgtgtcttgttcgtgggtttgctctcacaggaacatttgggtcaccagcccgagcccgtgtctccgaaacccgtcgcaaatcacactcaggggcctggtcaagggactaacatcagcaactcgcaagggcctatccaaggcggggtcccgacaaggcctagccaagcagaaggggccgtccaaggcggagactcaagggagcacgtccaaggcggagactcaaggaggcctggccaagacagaaactctgtcaagccggggcaggcagaggtgcctttccaggccatgcctcctctcgacactgcttccaacgaaacctccgaatccctcccgtcttcgacgctaggcagtgcgttctccgcggaccaaccgacgtctccgtcgctgtttagcccagcgctgagcgtagacttcgacgacgccgacaactacaatgaagagccttggcttctacgcggcaagcccatacatcttgccaagacctgcaagacagtgcttgtcctggaaggagaaacagcattgttcgtgaatcttcgcaccgccgagtttcctctgtccgcacaaagtactcattataactcggagacgacgacgaacgatcgattcgtgtcctgcgacggccccaacgagaagcaggacatttaccttgtccctgggggagttgccttgcgctcgacctcatacaagcaggcagggatgtatacgctgacagtgtcttaccgttcccactacgtccgcagttgttactgccttgtcgtgtggccgcagatgccgacgcctttcgtgggcgtacagtcggtttctcttgaacagcgtatgtgcaccgtccgtttcttttgtgccgtccggaacttgccagggctgctcctgacactggaaggaaagtacgcgttcctcgaggtaactctcgacgaaactcgcacggagacatacacgcacctcttcgtgcggatgactctgttccagcacgaaagcgcgagtgtgttttgccttgccaaggggccttacggggtcgacgcgagcgagacgttgttcctgcgcagcgtttgccggcgcgaggagtacaggctctcctggaggcggcaggggcatcagcgactactggacgaaaacacacagggcaagtgtggcgagcacctcgagaacaagccctctccagaagatctcgcccgcgggcgcgcgtgccaagtgctgctcttcctcgcgatcgtgttttccgcatcgtttgcactcgcgctcctcgagtccacgctgttgagcacgtggcgtgcgcggcgtatacgccgcagcttcgacctgtaa

SEQ ID NO: 15330 - DNA, 30 bp, unidentified; identical to SEQ ID NO: 8338
  source 1..30: mol_type = other DNA
  misc_feature 1..30: note = Synthetic

SEQ ID NO: 15331 - DNA, 159 bp, unidentified; identical to SEQ ID NO: 8339
  misc_feature 1..159: note = Synthetic
  source 1..159: mol_type = other DNA

SEQ ID NO: 15332 - DNA, 642 bp, unidentified
  source 1..642: mol_type = other DNA
  misc_feature 1..642: note = Synthetic
ttgaacattaaacaaaacttatcccacaacgccgcaacaatggaagtgctggtgatcatctctattatcgtcgccgtaatattcttaaccggagcggcgatatacctccttattgaactcggcttagccgccgagcgcgcgaacaaacgcgcgcgcgtgaagaaaaatatgcgcaaattagccactcaattgggaaatggatctgtcgactccggcataggcccgtgcacaatatcgcgcaccatggactttggccctagtcgctgggacagcgacagcgagggtgacggagacagtctctccacaacgtccaccagcggaggtgggactctcccccgagtgtgggttgggggcgggcccgggcccatgtacgaaaacttctgcggaaacggcacccaccgccactcccccaccaacgaccctggctaccactcgcgggagactctctgcagcggacctccccgtcaggcgccggagccactgaccaccccgaagcccgacgaggtaaaggtggaggtagggcctggtcccgacgaccggcaaggtctgtacgaggaacccgagccggtgcagatcgaggtaaccgtcaacgggcccggtggagaaggcgaggaggagggagaatttttctacgacgagtag

SEQ ID NO: 15333 - DNA, 81 bp, unidentified
  misc_feature 1..81: note = Synthetic
  source 1..81: mol_type = other DNA
atggtctcgtcgaaggacggaaacccggcgcagaaggccaggtcctcctggtcgaccaacgaaagcagattggtcatttag

SEQ ID NO: 15334 - DNA, 39 bp, unidentified; identical to SEQ ID NO: 8345
  source 1..39: mol_type = other DNA
  misc_feature 1..39: note = Synthetic

SEQ ID NO: 15335 - DNA, 51 bp, unidentified; identical to SEQ ID NO: 8346
  source 1..51: mol_type = other DNA
  misc_feature 1..51: note = Synthetic

SEQ ID NO: 15336 - DNA, 51 bp, unidentified; identical to SEQ ID NO: 8346
  misc_feature 1..51: note = Synthetic
  source 1..51: mol_type = other DNA

SEQ ID NO: 15337 - DNA, 819 bp, unidentified
  misc_feature 1..819: note = Synthetic
  source 1..819: mol_type = other DNA
atggtggacagcggcacgcacgacgtggactccgccgcgcaggagcgcacgcccaaccagcagaccttcttcaccaaggggctcagtccgctgatgcgccacacctacatctacaacaactacgcctacggctggattcccgagaccgcgctctggagcagccgtctgggcgactaccgcgtcacggacttctacccgatctcgctgggcatgctcaagaagttcgagttcatgttctcgctgctggcggaccccggcggcgcctgccccgcgtacgagcccaagctcaacaccgagttcctgaaccgcggctccttctcgggccggtacgtgaaccccttccaccgcttcgcggcgctgcccgagcgcgagtacatctccttcctgctgctgagctcggtgcccatcttcaacatcctcttctggtttaagggcgagaccttcgacactgccaagcacagcctgctcggcgccgtgtacaccacgcccgagcggcacatcgagctcgcgcggtacctgcggcgcacgggcgactacaagccgctgttcagccgcctgggcaacgacgacacctactcgaagcccttctcggggttcacgcgcatcagcaaccccacgcccatcgggcggctgccgccctcggacttcgagacgctggccaacctgagcaccattctctactacacgcgctacgacccggtgctctgtttcctggttttctacgtgccggggctttccgcgaccacgaagatcacgcccggcgtggagttcctcatggagaagctatcgctcgcgcccgagaacgtggtgctgctgtag

SEQ ID NO: 15338 - DNA, 1887 bp, unidentified
  misc_feature 1..1887: note = Synthetic
  source 1..1887: mol_type = other DNA
atgaggctccaactcccttttgcttacttgctccttttgttcctttccggcgttaatgggggcggatgggaccctcgttcccctcaaggacctgccccccgctggcgcggcccgcgtcgcggtcggtcaggtggctcccgccctcagggagccaatcagacctctgccacaccgctcacaacccgcgcatctgcgcctggcactgtccctgtccctgacgtcgaccagcgtggcactatcctccggcgtcaatacaatcttgcttcgtctccactttccctatctgtcgctggttcatctaatgctgtgctgtactctgcccctctctcccctttgctgcctttgcaggacgggactaatgcgcacatcatgtcaacggaggctagtaattatgctcaatacagggttgttgctgcaaccctgcgttttcgacctgtcgtgcctgcgtctgtcggtgggttttctataagcatgtctttttggccacagtccaacaatgttccaacatctgttgacatgaattctatcacatctactgacgtgcgcattgtctctcagcctggtatggccactgagcttgtgatcccaaaagagcgcctgcactatcgcaatcagggctggcgtagtgttgagactgcaaacacatcacaggaggaggcgacgtctggtaccatcatagtggcctgccatggcagtcctattaattcttataccaacacaccttacactggccccttggggcttcttgaccttgcactcgtccttgacttccgtaatctaacgcctggcaatactaattctaggttgacccggattaagaccacaactcagcaccgcctgacccgcgggccacgcggtgctcaattgtcttccccgtctttccaaagatttatgggtgatgccacacttggtaacaattctgctgttggtgaggttgggggcgggatcgtcggtttgattctgaatgtggctgatagtttgttggggaatataccatccactattttatccctcgctggtgggcagcttttatatgggaagccagtgacctcatccaatggtgagcctacagtcctgctttatgggtctgttgagcaggctcagcttgacaaaccactgcagattcctcatgatgttgatctcggcctgagtagcgttgtcgcccaggactatgttaacaatcatgaggctgaccgcccatcacctgcgcctgccccgaagcgtccgctcgggactctgcgcactggtgacatcttgttcttgcgtatgccgaacagtgagtatatcaactctacacctgacatgggcggtcctgtttatcgcagtcaaaatgctgagcttgtcaatgtcatcacaggtcaaagaggcccaatgcggtctgttgattggacgaaagccacactggatggggaggccctcccccgtactagcactggcacccccccatacataaagattcctcttgccggcaaattgtcgttctggcttcacggccattacaaccgtgccggttacccttatcagtatgacaacaatgagagtggggttatttttgtgtcgtcagagggcgatgcttacacttacatctccacttatagtaacagcctcggcagctccaacctggacctcgctgccgttggccaagctcaagcaccggcgacaagatctgccagagcccttctcgatgcccgacattcgttcaatgacagctgtgagatttgcatctcggtcgggcttgggaagtgtatatttgtttacccttccgagcgcccccatgaaggcgttccgcaaccaccatgctttccggccccattgccacccaggggcctgccggccgttaggtctgatgagtatgcttgtagtgtagacactaatgaaatttgttaa

SEQ ID NO: 15339 - DNA, 2718 bp, unidentified
  misc_feature 1..2718: note = Synthetic
  source 1..2718: mol_type = other DNA
atgacggccccaaacgtgcacatggccttgcaccatgtggagggcgcggaatacatgttccagctcgtctccaccgtgctccccacgctgtgttcggacttcaagcccagctacgacgtcagccgcacgtacgtgcacccgctggacgctctcttcctcgaggacgcggagaagctcgccagcgacgaggaaaccgaggccgccgtgaagcagttcggcatcaacttcctgctcgacagcgccgccaactcgcacctcatccccgtgctgctgggccccaacttcgcggagctcaagcccgccaacctcaagctgaccgacaccgccaaccccgtgatctgcacgcagtccttcaaggacgtgccgcccttcacccgcaacctgctgaagactcgcgtgaccagctttgaggcgcacgcgcgcatctgcggcggctacgtgcgctaccccaccggcctcccggcgaagtcgcccatctccttcccctcgctgagcttcgacaacacgtacctgctgaacctgatctaccccaacatcgccggccccgccgagatcggctttcgcgcccggctggtcgacgggaccatgctcgcgcgggacctgctcatgctgctcaacgtgcgcgcgctgctcaccgacgcctcccgcgccagaatggacgccatgtacgacatccccgacgccgcggccaagcacggaatcgtgctcacacagacgccacaggtggataccgagctgacgaccatgccgctcaagtacctgctcaccttcttccagtactttgactctgtgttctcgctgcgccagctcaccttcaacgggcaaaacctgcgcatggcgcgcggcagcgtggccagcctcgccgtgtccatcttctaccagagccagctggcgcgccttgcgcagctgcaccccagcgtgacgctcatggacagcctggaggtgctcactacctcaggcgcgaccctgcgcgtggcctcgcccggcatgcagttcgtagacgtctccgccaacatccgttactacgtgacgctgctctctatgctgatgcgcgccgaccgcacgtccccgctgatcgcgcccggaaagagcctgttctgggacggaatcgcgtacgcggagttcaagtccatgagcaccgccgactcgctcttcatgagctccgtctgctacaccttcgcgctcttcgaccacgacaacgtcacgtactgctcgctgctctcggacgcgctcgcggccggcaaggagcccctccgcgtgtgcttttacccgcgcgtcatgggccagaagaccgtgggcgcgctcgtgatggagacgctctcgggcatcaacgccatgacgcccagggagttcccgcgccggtcgacgcagcccaaccaccacatcgggctctcgcagcgcgccttcacgcagtttttccagatgctgcggctggtgtgcaactcggaccccgagacggcgatgaaggaagtgctcatggcctacgccgggctgaggatggaggacaaaggcgcgccgcactacatcaataaggagagctacctggacttcgtgaagctgctcttcggcgccatggggtaccgcgttagcgtgagtgcgtacacgctcggcagccgccggcacaccgccgtcgcggtctcgccctcggtgagcaaaacgaacatcgcgcgcagcctgggcaaggtctgctgcagcaaggaggaggtggagaaaatcatggcgtccgcacacgacctgctgcagttcatggtcacggccaccaacgtgcgcgacgcgcagggctaccgaggcccgagcgcgcagtgccggtttccctccttctcctttccggcgaactggcggtttccgcgcatcatctacggcggcgccaaggacgccgccgagacggccgaccagtcggtggtgctgtgctcgcaggacatgggcattctggaccgcatcaacgtgaggggcatcttttccgcgagcacggtcgacgagctcatgggcgtggacgggttcatgcccgaaaacacggccttcaagcgcaacctgcagagcatgatcgacgagggctgcctctcgagcgagggcatcctcatgtccatgccctgcaacctgctcgaccgtctggtgaccgtcggcggctcgcccgacatcacgatatcggggctgctggacgaggtctcgggcagctcggacgactcgagcgtgagcagcaacgagatcgcggatgccatcaacgccgcgctgaagacgcgctacgtgcgcgacacgagcaacgtcgtgaacagcgcgctgagcatcgcgagcgcgcgctccgagaagcagctcgacgccgtcaagcgcgcgacctgctgcatctccgcgctcttcaagcagctcacgcagtccgtgtacaccacggagcgcatcttcggagtcccgatcgcggacgaggtgaagaacagcatcctggagcggtacaacctcttcgtgcagctctcgaagtcgctgtacatggacatgatcgcgctggagaacctgaaggcgctgctgctgatcgtgcgccgcagcggccggtacgtgggcgacgcggagatcggcgttgcggagatgcagaaggcctacgagctggtgcgagaaaaaatatcgcggctgacggcgtactactcgagcatcggcgagatgtactggaacaacatgaagcgcaacctcaacctccggtcggatggcgccgtttcttttgacagtgagtaa

SEQ ID NO: 15340 - DNA, 21 bp, unidentified
  source 1..21: mol_type = other DNA
  misc_feature 1..21: note = Synthetic
ttgaaaatactaattgtttaa

SEQ ID NO: 15341 - DNA, 21 bp, unidentified
  misc_feature 1..21: note = Synthetic
  source 1..21: mol_type = other DNA
atcctgccagaactgttttag

SEQ ID NO: 15342 - DNA, 60 bp, unidentified
  source 1..60: mol_type = other DNA
  misc_feature 1..60: note = Synthetic
atgccgtatataagacgtatctccataaagaaattagtggtaaaatggccaagaaaatag

SEQ ID NO: 15343 - DNA, 33 bp, unidentified; identical to SEQ ID NO: 8363
  source 1..33: mol_type = other DNA
  misc_feature 1..33: note = Synthetic

SEQ ID NO: 15344 - DNA, 1293 bp, unidentified
  source 1..1293: mol_type = other DNA
  misc_feature 1..1293: note = Synthetic
atgtggactatcttgctgttttgcgttcctgtgatttatggagaactctatccggatttctgtcccttagcagttgtggattttgatgtgaatgctacagtggatgatttgctattgttcgacatatctttgagcaaacaatgttcagacgataaaatcagacactctgcagtcgcggcaatgacagacaatgctttcttttttggcaacagcgaaacgcaaattgaaaccgattttggcaaatatttggctttcaactgttatcaagtattttctacactaaatcattttttgtttaagaactttaaaaaaacaaaaggactgatgaagcgatatgataaactctgtcttgatgtcgagtcttacattcatattcaaattatctgttcaccctttaaaagttttatccgtctgagacgtatgaatgaaactggaatttctcctagaattcttgaaaccacattctacttgcaaaataaaagaaacagcacgtgggtagcgattaaaaactatttaggtgaagatgatcccttcacttatcgaatttggcacactttgacacacgctaaaaactttctgatcaattcttgtgaaaatgacttcaatcaactttttttttggcaaagaaagtacctatcactcgcgaaaacattcgaagctacatttaagcaaggctttaatcctatgattgaacaaagaaatgaacaacgatatagaactaataacatagattgttcattttcgaaatttagacagaatggtgtaaaggtagcagtttgtaaatatacaggatggggtgttagcggtttcggctccttagaagttctgcaaaagataaaaagtccgtttggagaagagtggaaaagagttggtttcaactctacgggtgcttttactcctttgtatggtagtgatgtgctttggggtctaatttttctaagagtagaaatgaccacatatgtttgtacctgtacgaataagaacacaggaacacaaatacaggtaacattacctgatgtggatttggatctattagatagtgaaaaaacgtctagtaatgttttcgtagacatgctttgctacacattgattgctatattattccttgcatttgttacagcggtagttttattaggagtttcctgtttagacggtgttcagaaagttctgacgtggcctttacagcacatacaaaaagaaccagtatcagagaaaataatcaatctaacaaacttgatgtttggacaagaaccgttacctaaaaaagaatctctcaaacagcaatgtttgtga

SEQ ID NO: 15345 - DNA, 33 bp, unidentified; identical to SEQ ID NO: 8365
  misc_feature 1..33: note = Synthetic
  source 1..33: mol_type = other DNA

SEQ ID NO: 15346 - DNA, 33 bp, unidentified; identical to SEQ ID NO: 8367
  misc_feature 1..33: note = Synthetic
  source 1..33: mol_type = other DNA

SEQ ID NO: 15347 - DNA, 660 bp, unidentified
  source 1..660: mol_type = other DNA
  misc_feature 1..660: note = Synthetic
ctgcccttctcctgttccctccgcccccaaaactgtcagcgacgctcagacgtcatgtgcgacgcctcgggcgcctgtgacatgaggcacgtccagaacgcgtttaccgaggagatccagttacactcgctctacgcgtgcacgcgctgctttcgcacgcacctgtgtgatctgggcagcggctgcgcgctcgtctccacgctcgagggctccgtctgcgtcaagacgggcctggtatacgaagctctctatccggtggcgcgtagccacctgttggaacccatcgaggaggccgcactggacgacgtcaacatcatcagcgccgtgctcagcggcgtgtacagctacctcatgacgcacgccggccgttacgccgacgtgatccaagaggtggtcgagcgcgaccgcctcaaaaagcaggtggaggacagtatttacttcacctttaataaggttttccgttctatgcataacgtcaatcgtatttcggtgcccgtcatcagccaactttttattcagcttatcatcggtatctactcaaagcagaccaagtacgacgcgtgtgtcatcaaggttagtcgtaagaagcgtgaggacgcgcttctgaaacagatgcgttccgaatatggaaacgcacctgtattcggatctggcgtttga

SEQ ID NO: 15348 - DNA, 42 bp, unidentified; identical to SEQ ID NO: 8370
  misc_feature 1..42: note = Synthetic
  source 1..42: mol_type = other DNA

SEQ ID NO: 15349 - DNA, 573 bp, unidentified
  misc_feature 1..573: note = Synthetic
  source 1..573: mol_type = other DNA
atgagttaccggcaggagcacgtgctgcggagacttcgccaggacagacacgggaatttggagaccgcgcgggatctggaacgtccagggtggaggtggatccaggaacaaagggaagcgctcaacgtaccagcacggagagcacgagcggaagcgctgacgctcacgttcgggatcaggcgagtcgaagcgacgctgcccagggagatactgcatctcgggatggacttcatgctgcggggcatggacgtgccgtcggaggtggtggagatactcgcaatactgcgcaatcgagcgaaagtccggcgggaagtcatagcatggagtctcgcggcccggaagcggggcctggagttccttttgttgccactgcacgaatacgtgacgcactgcgcgaaagaggatatccggatatacgagtcctcgggtctgaaatccctattccggatagagatcgcgtcctgttatttggcgcggccgcgcttaaggagctcggagttggtcaggatgagaatgctgcgcagaaagacgcggaggcgaagctgcgtcgggacaaggtgcgttcagcaatga

SEQ ID NO: 15350 - DNA, 654 bp, unidentified
  misc_feature 1..654: note = Synthetic
  source 1..654: mol_type = other DNA
gtgagggtgccattgtttaccgccatcgcacttgttattgttctactcctggcatactttttgccacccagggtaagaggaggagggcgggtggcagccgcggccatcacctgggtacccaaaccaaatgtagaggtctggccggtggatcctccaccgccggttaactttaacaagacggccgagcaggagtatggggacaaagaggtaaaactgccacattggacacccaccctgcacacatttcaggtaccccaaaactataccaaagctaactgtacatactgcaacaccagagaatacacattttcatataaaggatgctgtttttatttcaccaaaaagaagcacacctggaatgggtgtttccaagcctgtgcagagctatatccatgcacttatttttatgggccaacgcccgatattctacctgtggtaactagaaatctgaatgccattgagtccctttgggtcggggtgtacagggtgggagaagggaactggacatcattagatggggggacttttaaggtttatcaaatttttggctctcattgtacatatgtcagcaaatttagtacagttccagtctcacaccatgagtgttcattccttaaaccatgtttatgtgtcagtcaaagatcaaatagctaa

SEQ ID NO: 15351 - DNA, 717 bp, unidentified
  misc_feature 1..717: note = Synthetic
  source 1..717: mol_type = other DNA
atattaataaatatcttcctgttggctctctttgaagtggttgccatggtttcgtttaagcaggtgagggtgccattgtttaccgccatcgcacttgttattgttctactcctggcatactttttgccacccagggtaagaggaggagggcgggtggcagccgcggccatcacctgggttcccaaaccaaatgtagaggtctggccggtggatcctccaccgccggttaactttaacaagacagccgagcaggagtatggggacaaagaggtaaaactgccacattggacacccaccctgcacacatttcaggtaccccaaaactataccaaagctaactgtacatactgcaacaccagagaatacacattttcatataaaggatgctgtttttatttcaccaaaaagaagcacacctggaatgggtgtttccaagcctgtgcagagctatatccatgcacttatttttatgggccaacgcccgatattctacctgtggtaactagaaatctgaatgccattgagtccctttgggtcggggtgtacagggtgggagaagggaactggacatcattagatggggggacttttaaggtttatcaaatttttggctctcattgtacatatgtcagcaaatttagtacagttccagtctcacaccatgagtgttcattccttaaaccatgtttatgtgtcagtcaaagatcaaatagctaa

SEQ ID NO: 15352 - DNA, 1641 bp, unidentified
  source 1..1641: mol_type = other DNA
  misc_feature 1..1641: note = Synthetic
atggctacacaagaggtcaggctaaagtgtttgctctgtgggatcatagttctggttttgtcattagaagggctagggatactacattatgagaaacttagtaagatagggctggttaaaggtattacaagaaagtacaagattaagagtaaccctttgaccaaggatattgtgatcaaaatgatccctaatgtctcgaatgtctcaaagtgcaccgggactgttatggagaattacaaaagcagactcacagggattctctcaccaatcaaaggcgccatcgaactgtacaataataacacgcatgacctagttggtgatgtcaagcttgcaggtgtggtgatggcagggattgcaatcgggatagctactgctgcacaaatcacagcaggtgttgccttatatgaggcaatgaagaacgcagacaatatcaataaactcaagagcagcatagagtctacaaatgaggctgttgtcaaattacaggaaacagctgagaaaacagtctacgtccttactgctcttcaagattacatcaacactaaccttgttcctacaatagatcaaattagctgcaagcaaacagagctcgcattagacttggcgttgtctaagtatctgtctgatctgctctttgttttcggacctaacttacaggatccagtctctaattccatgactatccaagcaatatctcaagcatttgggggcaattacgaaaccttactgagaacgcttggttacgcgaccgaggacttcgacgaccttttagaaagtgatagcatagcaggccagatagtctatgtagatctcagtagctattacataatagtaagggtgtattttcccatactaacagagatccaacaggcttatgtgcaggagttgcttccagtgagttttaataacgataattcagaatggatcagcattgtcccgaatttcgtgctgattaggaacacgctgatttcaaatatagaagtcaagtactgcttaatcaccaagaaaagtgtgatttgtaatcaggactatgctacacccatgacggctagcgtgagagaatgcttgacaggatccacagataagtgcccaagggagttagtagtctcatcccatgttccaagatttgccctctcaggaggagtcttgtttgcaaattgtataagtgtgacatgtcagtgtcagactactgggagggcaatatctcaatcaggggaacagacactactgatgattgacaatactacctgcacaacagttgttctaggaaacataatcataagccttggaaaatatttgggatcaataaattacaattctgagagcattgctgttgggccaccagtctatacagacaaagttgatatctcaagtcagatatctagtatgaatcaatcactacaacaatctaaggattacattaaagaagctcaaaagatcttggacactgtgaatccgtcgttgataagtatgctatcaatgatcatcctttatgttttgtccattgcagcactgtgcattggtctgatcactttcataagctttgtaatagttgagaaaaagagagggaattacagcaggctagatgataggcaagtgcgaccggtcagtaatggtgatctgtattatattggaacataa

SEQ ID NO: 15353 - DNA, 147 bp, unidentified
  misc_feature 1..147: note = Synthetic
  source 1..147: mol_type = other DNA
atggtgactgcagaggccaaagaggggggaatggagatctttgtgccatcacaccgctccatgtttgcttggatgaggtttcatgatctgtcactgtgggaaggtagtcgcgacacccttcccgattttgtaaatgaagatgactga

SEQ ID NO: 15354 - DNA, 147 bp, unidentified; identical to SEQ ID NO: 15353
  source 1..147: mol_type = other DNA
  misc_feature 1..147: note = Synthetic

SEQ ID NO: 15355 - DNA, 18 bp, unidentified
  source 1..18: mol_type = other DNA
  misc_feature 1..18: note = Synthetic
atgccacttactaaatag

SEQ ID NO: 15356 - DNA, 10218 bp, unidentified
  source 1..10218: mol_type = other DNA
  misc_feature 1..10218: note = Synthetic
atggcaacaaaggggatgaataagtctcgggctcgatcccgaggcgtcaatatggtagcggctagagtgaagaacctagccgttaaagtaaaaaacaaaacaaaacaaagtgcaagaggtttgcgagggttcctcttgtttctagtggcccaaattttctgggctagaaaactaaccccgcaggttaaaagattgtggagaatggtggacaaagtgcaaggtctccggatcctgaagaacattaggaacatcgttaccaatctgatgaagggactggctggtcgcaagaaaaagcgaagcttgacagtacccttggtccttttgctgattccactgattgcttactcagctactgtcacccgtcaacgcggattggggcttttgctcaacgtcacttttgctgacgttgggaagacctatgaggttgaggggggcaattgctctgtcaacactttggatgcgggcaaatggtgtgaagattatgtggagtatgagtgcgtcactctctctgagggtgaagagcctgacgacctggattgttggtgctacggagtggacaatgtccgtgtcacctatggaagatgcaagagtggtggttcacgaagatcgaggcgctctgccgtcataactccacatgtagacaaaggacttactactagacaggaaaagtggctgcccacaaagattggagaacagcaactgcagaaagtggaaaaatggattatgaggaatcctctctatgcacttggggcggtggctttagcatactttgttggcacatcaaatgtgcagagggtagttattgccatcttgcttcttggcattggaccagcttattcaacacactgcttaggaattccaaaaagggacttcataaggggacttgatggaaacacctgggtgtcagtggttttagaacagggcagctgcgtgactttgatagccgacaacaagccatcagtagatatttggctgagttccatagtggttgatacgccaactcttgtgaggaaagtttgctatgcgagctctgtgactggatcgaaagcaactggagcctgtccaactatgggagacgcccacatgtctgaagaaggaaatgaagaatgggaatgcaaaagatcatactcggaccgaggatggggtaacggttgtgggctttttggtaaaggaagcattgtggcatgcgcaaaattttcatgcacacatgaaatggaggtttatcagatagatgccactaagattgaatataccatcagtgcccaagttcactcgggagccaagaaagatgattgggaaaatcacacaaaattggtgacttttgttccgaccacaggaacatcaactgttgcttttacaggctatggaaactttggcttagagtgtcacgttcagatgatggtggacctcagcaattcctatctggtgaaagtaggaactgatgcctggctggtcaacaaacaatgggttcacgatattactctcccatggcagagtggaacaggaggacattggagagacaagcatttcatggttgactttgaagaaccacatgcagtcactatgaaggcgttggtcctgggtagccaagaaggggctcttagaacagctctgtctggtgcaatggttgtggaactaaattctaatagatattcccttaaaggaggtcatgtgacgtgtaaggcgtacatgaacaatctcatcctgaaaggttcaacctactcaatgtgcaaaagagggatgtcctttgctaagcaaccagttgagacagaccatggaacagcagtgatgcagataaaagttacaactggagctccgtgcagaattccagtgattgcagcagattccatggcgggaacagaaaaccgtggaagcgtcatcacaaccaatcctattgctgcgtcaaacaatgatgaagtgttggtggagatcagtccaccatttggagagagttacatcatcgttggtaatggagatgataaacttacataccactggcaaagatcaggaagcaccatcgggaatctgttcacagagacaatgaaaggagcccaacgcatgattatcacaggtgagcactcgtgggactttggctcaaccggaggatttttctcatccattgcaaaagctgtgcacacagtctttggtgctgccttccatgcaatttttggtggtctcagttggataaccaagatattgattggagggttgctcatctggctgggtctcaactctcggagtagttcaatgtcaatgggcttcatatgcattggagccttgctgcttgtgctggccacaggagttggagcagaagtgggttgctccttgagttggaagcaacgtgaaatgaaatgtggggatggtgtttttgtctttaaggattctgatgattggttttccaaataccagtacattccagaagatccaaaaacaatggccaccttgattcatcaagcccaccaggatggactatgtggtttgagttctgtcagcgacctggaacatcgaatgtggtattctagagtcgacgagataaacgccatcttggatgaaaatgaagtggatctcacagtggttgtccaagaatcagatgccgtgtacctgcgaggatcgcatgctttccctcggccaaaaagtgaattgaagtatggatggaagacttggggaaaaaacatcatctttaatccatctagaaaaaatggtacattcatcattgatggaaaaagtaaagcagaatgccccttcaacaagagagtgtggaactcaatacgggttgaggagtttggcacaggagtttaccagacaagagtcttcatgagaccggaatttgattacaccaaactgtgtgacacgggaactttgggagctgctgttaaaggtagcgtttcagctcacggagaccccatgttctggatggaatcagaagagatcaatggcacatggatgatcacgaccttggaagcattaaattaccgtgagtgtgaatggcctagttcacacacactggatggagcaaaagtggtggaatcagacatgttcatgcccaggagccttgctggacccatcagcaagcacaaccacattccaggatacaaggtgcaaactagtggcccatggcacaatgtcccacttgaaataaaaagagaagagtgcccaggcaccactgttgtggtagatgagaagtgcgatgatagagcaaagtcagtaagatcaacaacagatagtggaaagatcatacctgaatggtgctgccgcagttgcaccatgcctccagtgagtttctgggggcctgacggctgctggtattccatggaagttaggccaaaacacaccaatgaagcacatctggtgaaatcctgggttgttgcttccaaaggagatgttgaccctttttctctggggcttctcatgttgtttctctgcagcgacatgttcctgatgaagaggttctccatgagagctattctagttgggagtctggtcatgctgggagcgatgacattggggagcctgagttatctggatctcctaaggtatgccataacagttggaatgtacatggctgagataaacagtggaggagatgtcacacatctggctctgctagcggtttttcgggtgcgggctggctttgttagcatgctggccctaaaacgactttggagccctagagagggatttgtggcaacatgtggaattgtcatggtccagcttgcattaggagacatattgtcaactgacatcatggaatggctgaatgcggccggtatggcagtgctcatcatcaaatcaattgttgaacctaaacggtgtaatgctgtgttgcctttgctttgcttgctgaccccactgactgtggccgaaatacaaagggcagtgatgtttgtctgttccattgtgatttttgtcacagtttggcagactgacagcgtctcaaccagaaaaaccatccccttggttgctctgactgtttgctctttcttcaaatggactagcccctttttaggcatagtttgctatcttgcattcacacgccttccccagcgatcttggcctcttggagagaccatggctgctgttgggctggttggagtgcttgctggcatgggactgaaggacatgaacggaatgcttggaccagtggccgttggtggagtgttactaattgtaatgagtctttcaggaaaggttgatgggctggtaatcaagaaagtggctgacgtgacctgggatgaggatgctgagattagtggagcatcacaccgttatgatgtggaacaaactgacacaggtgagttcaagttacgaaatgaagaacccgccccctggattcaggtggctgtcttgacaatagctatccttagtgcagccacacatcctgcttgtcttgccgtggtcacaattggctggtttgcctggcaaaagacaacaacccgcagcggcgtgctgtgggacataccaacagttgtccctccagaggaggtcagttatctggaagatggagtctacactatcaaccaaaacagcttcttgggccttgctcagaaaggagtgggtgtggtgaaggatggagtgttccataccatgtggcatgtgacccgtggagcttttttgctccatgcaggaaaaagaatgactccatcatgggcaaatgtgaaagaggatctcatttcttatggtggtggctggaagctagatgccaaatgggacggttctgaagaagtgcagcttatagctgtgtcccctggaaaagttcctgtgaatgtgcaaaccacgcccagtgttttccaactgaaaaacggaaaagaaataggagccgttaatcttgactatcctagcggtacctctggctcaccaatattaaacaaaaatggagatgtcattggcctatatggaaatggaatattgattggaaataacacctacgtctcggcgattgcacaaagtgacagcgtggaggaagggggaactgaacagctccaagacattccaacaatgttaaaaaaggggatgcttacagtcctagacttccatccaggagctggcaagacacgcatttaccttccacaaatcttaaaagaatgtgaaaagcttaaattgaagaccttggtattggctcccacacgagtcgttctcagtgaaatgcgagaggccatgccaaagatgagcatcaagtaccacacgcaagcattctctaacacaagcaccggaaaggaaattattgatgccatgtgccatgccactctgacccatcgcatgttagagccaaccagagtcaccaattgggaagtcgtgataatggatgaggcccattttatggacccggccagtattgcagcaagaggttgggcagcccacagatccagggctcgggagtgtgccaccatattcatgtcagctacccctcctgggacaagcaatgaatttccagagtcaaatggcatgattgaagacgtcaagaaagatgttccctctgaaccatggacaaaagggcatgaatggattttagaggacagacgccctactgcttggtttctcccctccatcaggatagccaattctatcgcaaactgcctccgtaaggctgacagaacagtggtggtgctgaatagaaagacctttgaaaaagagtatcccacaataaagtcaaaaaagcctgacttcatactggccactgatatagctgaaatgggagccaacttgaaagtggagcgagtcatcgactgccgcacagcttacaagccaattttggttgatgatgccacgaaagtcatggtcaaagggcccctgcgcatatcagcctcatcagctgcacagcggcgtggaaggattgggagagatcccaacagagacactgacacctacatttatggagactcaacaactgaggacaatgggcactatgtctgttggacagaaggttcaatgctcttggacaatatggaaatcaggaacggcatgatcgccccgttatacggagtggaaggcaccaaaacaacaacaagtccgggagaaacacgactaagagaagaccaacggaaagtgttccgagagctggtcaagagacttgacatgccggtttggttttcatggcaggtcgcgaaggcaggtctcaaggtgcaggacagaagctggtgttttgatggtgaggatgacaacaccttacttaatgacaatggagagccaattttagccagaagcccaggaggagccaaaaaaccgctgaagccccgctgggtcgacaccagggtatgcagtgacaatgcatcattaattgattttatcaaatttgctgaaggccgacgttctgctagcgggattttgttaggcttgcaaggatttcctgaatttctgtctgggaaaatgcgggaagcgatcgacacagtaacagtcctatacactagtgacactggaagtagagcctacaaacacgcactagcaatgatgcccgaagctacaacaattttcctactggtgatgctggctatcatttgtacatctggggtcatcatgttttttttggctccaaaaggactaagcaggatgtcaatggcaatgatgacaatgctggtgtctgcctatcttatgtcattgggaggaatgaaccctgtccagatttcttgtgtcatgttggtatttttcattttcatggtggtgctaattccagaaccgggcacacagagatctacctatgacaatcaaatcatctacttgttggtaggggtgctgagcttaattctcttagtggccgcaaatgaaatggaactgctggaaaaaacaaaaagggatatttttggagctgtggtggtcgaggaggctaaaagatggacatttcctgagttcgacctacgcccaggagcagcctggactgtctacgtcgggcttgttactcctggtaaccccatgctccaccattggataaaaattgattacgggaacatttctctgtctggcataacacaaaatgcacaggtgctgggactcatggatagaggcatacccttcatcaaaatgaacatgtcagtggtcattctcctcctgagtgcatggaatggaataactctgctaccacttttcgcaggtatgggagcagctgcactccattggggtttcatcctaccgggactccgagcacaggccgctaaagctgcacaaaaaagagtttaccatggggtggcaaagaatccagtggttgatgggaatccaacagtggatattgatgatgctcctggcatgccggccatgtatgaaaagaaattggccttggtgattttgctggcgctttcaatcttgaacttggttttgaccagaaccccctttgcaacggctgaaatggttgtgctaggctcagcggcggtaggaccactcattgagggcgacaccaatgcttattggaatggacctattgctgtagcgttttcaggattgatgagaggaaactactatgcaaccattggacttgcctacaatggatggttggccaaacagacaaggagaggcaaagcagctggagtgaccctgggggaagtttggaagaggcagctgaacatgttagggaaacaagaatttgagaggtacaaagtgccagacattactgaagtggaccggaccgcagctaggcgttacctgaaagaaggacgaacagatgtgggaatcagcgtctctcgaggagcagccaaaatcagatggcttcacgagcgcggctacctcagaatcacaggacgtgtcctggaccttggatgcggacgcggtggatggtcatattacgctgccgcgcagaaggaagtcatgagcgtcaaaggttacacactaggaattgagggtcatgagaaaccaatccacatgcaaacattgggatggaacattgtcaagttcaaagataagtcaaatgtgttcaccatgccaactgaaccaagtgacaccttactctgtgacataggtgagtcttcatcaaatcccttggttgagagggacaggaccatgaaagtgttggaaaattttgaacgatggaaacacgtgaacacagaaaatttttgtgtcaaagtgttggctccctatcatccagatgtgattgagaagctggaaagactgcaattgaggtttggtggtggaattgtgagggttccattttccagaaattcgactcatgaaatgtactacatatcaggagcccggaataacatcactcacatggtcaacacaacatcaaggagtttgctaagaagaatgactcggcctagtgggaaagccatcatagaaggggacgtgtttcttcccactggaacgcgaagcgttgccagtgaagcgggcaccatagaccatgaggcgctcaagctcagagttgaccagattaaggcagagtactcaaagacttggacacatgattcaaaccacccatatcgaacatggcattatctaggaagttacctatgcaaggcaactggcagttcatcttcaatgatcaatggcattgtcaaaatgctgtcgatgccatgggacaaattcgaatctgtgactcttctggccatgactgacacaaccccgtttgggcagcaaagggtgtttaaagagaaagtggacacaaaagccccgcctccacctccaggaacacgtgcgatcatgcgtgttgtcaatgcttggttgttccaacacctcgctcgtaagaagaagccccgcatttgcacgcgtgaagagtttgtggccaaagttcgtagccatgccgcccttggagcgtatctcgaagagcaggacaaatggaagagtgcaagtgaggctgtccaggatccacagttctggaaactggttgatgatgagaggaagctgcatctgcaaggccaatgccggacatgtgtgtacaacatgatggggaaacgtgaaaagaaaccctctgaatttggcaaagcaaagggaagcagggcgatctggtacatgtggctaggagctagattccttgagtttgaagcactgggattcttaaatgaagaccactgggtgtcccgagagaactcagggggaggggtggaaggaacaggcttacagtaccttggctacatactgaaggaactgggtggcaaaacaggaggaaacatgtatgcagatgacacagccggatgggacacaaggatcacggaagaagacctggaggatgagcaagagattctaaaatacatggatgaaaaacacaaaaaactggcttgggctgtgacggagttggcatacaaaaacaaggtagtcaaagtgatgcgtcctggccctggagggttgaccttcatggacattatttcaagaagggatcaaagagggtccgggcaagtggtcacttatgccctgaacaccgtgactaatcttaaggttcaactcatacgcatggcggaggcagagcatgtcattacaaattttgatgttgacacagttagccagaagaccctgcaggacttgagatgctggcttgacagatttggtgcagatcgcttgtccaggatggcagtcagtggtgatgactgtgtagtgaagcccattgatgaccaattcgccgatgcactgacccacttgaattccatgtcaaagattaggaaagatatagatgactggaaaccatcccaaggctgggcctcgtgggaggatgtcccattctgttcccaccacttccatgaactgatcctaaaggatggacggtcgataatagcaccatgccgtgatcaggatgagctcatagggagggcccgtgtgtcccctggaaatggatggatgatcagagaaacagcctgccttagcaaggcatatgcacaaatgtggctgttgatgtatttccaccgcagagaccttagagttatggccaacgcaatcaactcgaccgttcctgtggattgggttccaactggaaggacaacatggtctattcatggaaagggagaatggatgaccactgaagacatgctgcaggtgtggaacagagtttggatagaagacaatccacatcagactgacaaaacaccaatcactgagtggcgagacattccttatctgccaaagtcaattgacaagacatgcaactcactcgttggaaccacacaacgagcttcctgggctagagatatcaagcacacagtccatagaatccgtggacttgttggaaatgaaaaatatacagactatctagccactatggacagattcagggaactcgatgagagtggccctggagaagtcttgtggtaa

SEQ ID NO: 15357 - DNA, 1092 bp, unidentified
  source 1..1092: mol_type = other DNA
  misc_feature 1..1092: note = Synthetic
atgttttgtcgctctccgtttctcggtatatcttcttggagtctggcctctgcggctctctgcccttcttcgtgctctttccctgcgggacgtgatctgcggtgcgatgcggcagtgccggaggttaaatggacggcgttcgttcggactctcgtcgcccggccgctatcggcggacgacgtgagggacttcgtctctacttttgcccattgcaggttggcgctctcgtggcccgtgggggcagaactgagattcgccacctccgacatgctcgggatcacgcaggccgagttggccaagctgtctcgcggatacgggtgctgtcccggtatggatctcacggtcatcggggtcactatcttcgcagaagtttccgcgctggtgctggtcggagagtgcggggagatatacgcgtttaacggcgtgttcgacgacgcgctgtaccgtctcgcggaggacgcgttcggtctctggaagcacggcttgcgtcgcttcgagcccgtctacggttccaagtgtctcatggaaaccggcgcctctttcttcggcggcatgagtggagttgacgacgccctggctttcgccgtgtctttcgataaggctctcgtgccgttgccttggccgcgcggagctttctttgagtttgccgtacccaggagggcggagaagaggtggcggctcatacccggcggaggcgtcgcggtggtgatcggcagattcttcggacgcggcgttactttacctctgctcagacgacagcgggtgctcatggatcaggtcggcagggtgtatgcggccagtctcgacgggggagccgtggtgcgcctgtccgatagcttcagggcgtttctcgccatgggtgtcagaaaactgttcaagaaccatcgattccctccgggacatctgtggaccatgcagctgcccgtgacgtgcgtgcacgcgcctgtgataaatctacctgccgtctatcaactttctccgcacatggtagagcgggaaatgtccgcagtctcttgcggggcttctaccgtagtccgtagggactgcgaggacacgttgcgcgacggagatgcgggagttgacacttcgtga

SEQ ID NO: 15358 - DNA, 15 bp, unidentified
  misc_feature 1..15: note = Synthetic
  source 1..15: mol_type = other DNA
atagcaatcagttaa

SEQ ID NO: 15359 - DNA, 267 bp, unidentified
  misc_feature 1..267: note = Synthetic
  source 1..267: mol_type = other DNA
atgtcgtgggccctggaaatggcggacaccttcctggacaccatgcgggttgggcccaggacgtacgccgacgtacgcgatgagatcaataaaagggggcgtgaggaccgggaggcggccagaaccgccgtgcacgacccggagcgtcccctgctgcgctctcccgggctgctgcccgaaatcgcccccaacgcatccttgggtgtggcacatcgaagaaccggcgggaccgtgaccgacagtccccgtaatccggtaacccgttga

SEQ ID NO: 15360 - DNA, 90 bp, unidentified; identical to SEQ ID NO: 8388
  source 1..90: mol_type = other DNA
  misc_feature 1..90: note = Synthetic

SEQ ID NO: 15361 - DNA, 78 bp, unidentified
  source 1..78: mol_type = other DNA
  misc_feature 1..78: note = Synthetic
atgatggatatgatggatatgatggatatgatggatatgatggatatgatggatatgataaatatgataaaaatataa

SEQ ID NO: 15362 - DNA, 30 bp, unidentified; identical to SEQ ID NO: 8390
  source 1..30: mol_type = other DNA
  misc_feature 1..30: note = Synthetic

SEQ ID NO: 15363 - DNA, 390 bp, unidentified
  misc_feature 1..390: note = Synthetic
  source 1..390: mol_type = other DNA
atgatcctgaccacaaaggaagtaaaaattttaaaaagatgtatgtcagtgtgcctgtgtcccgctaccctggatctggtgagagcccagatggtaagcgggtacgagcgctggatcctgcattgccactgttcatccccgggctccctgcagtgccgggcgggaggcaccctgctggccgtgtggtttaggagagtcatttacgggtgcatgtttaaccagcgcttcccctggtaccggcagattgtgaacagaaatatgcccaaagagattatgtatatgggcagtgtgtttataaggggcaggcacctgatatactgccgcatttggtacgatggtcacgtgggttccatcattcccaacataagctttggctggagcaccctaaat

SEQ ID NO: 15364 - DNA, 225 bp, unidentified
  source 1..225: mol_type = other DNA
  misc_feature 1..225: note = Synthetic
atggcaatcaatgtatttacgaattcacagatatttaatattatttcttacattattttgtttattctgttctttgcatatgtgatgaacatcgaaagacaggactataaaagaataaatataaccattcctgaacatcatacatgtaacaaaccttataatgcgggaaataaggtagatgttgatataccaacatttaacagtttaaatactgacgattattaa

SEQ ID NO: 15365 - DNA, 1464 bp, unidentified
  misc_feature 1..1464: note = Synthetic
  source 1..1464: mol_type = other DNA
ttgagtgttagcagaatggaaaacaagatcgaggtgaataacaaagatgagatgaacaggtggtttgaagagttcaaaaaaggaaatggacttgtggacaccttcacaaactcctattccttttgcgagagtgttcccaatttggacaggtttgtgtttcagatggccagtgccaccgatgatgcacagaaggactccatctacgcatctgctctggtggaggcaacaaagttttgtgcacctatatatgagtgcgcatgggttagctccactggcattgtaaaaaagggacttgaatggttcgagaaaaatgcaggaaccattaagtcctgggatgaaagttatactgagctaaaggtcgacgtcccgaaaatagagcagcttaccggttaccaacaagctgccttgaagtggagaaaagacataggtttccgtgtcaatgccaacacagcagctctgagcaacaaagtcctcgcagaatacaaagtccctggtgagattgtgatgtctgtcaaagagatgctgtcagacatgattaggagaaggaacctgattctaaacaggggtggtgatgagaacccacgtggcccagtgagccatgagcatgtagactggtgcagggagtttgtcaaaggcaaatacatcatggccttcaacccaccatggggggacatcaacaagtcaggccgttcaggaatagcacttgttgcaacaggccttgctaagcttgcagagactgaaggaaagggaatatttgatgaagccaaaaagactgtggaggccctcaacgggtatctggacaagcataaggacgaagttgatagagcaagcgccgacagcatgataacaaaccttcttaagcatattgccaaggcacaggagctctataaaaattcatctgcacttcgtgcacaaagcgcacagattgacactgctttcagctcatactattggctttacaaggctggcgtgactcctgaaaccttcccgacggtgtcacagttcctctttgagctagggaaacagccaagaggtaccaagaaaatgaagaaggctcttctgagcaccccaatgaagtgggggaagaagctttatgagctctttgccgatgattctttccagcagaacaggatttacatgcatcctgccgtgcttacagctggtagaatcagtgaaatgggagtctgctttgggacaatccctgtggccaatcctgatgatgctgcccaaggatctggacacactaagtctattctcaacctccgtaccaacactgagaccaataatccgtgtgccaaaaccatcgtcaagctatttgaagttcaaaaaacagggttcaacattcaggacatggacatagtggcctctgagcacttgctacaccaatcccttgttggcaagcaatccccattccagaacgcctacaacgtcaagggcaatgccaccagtgctaacatcatttaa

SEQ ID NO: 15366 - DNA, 57 bp, unidentified; identical to SEQ ID NO: 8395
  source 1..57: mol_type = other DNA
  misc_feature 1..57: note = Synthetic

SEQ ID NO: 15367 - DNA, 48 bp, unidentified; identical to SEQ ID NO: 8396
  source 1..48: mol_type = other DNA
  misc_feature 1..48: note = Synthetic

SEQ ID NO: 15368 - DNA, 183 bp, unidentified
  source 1..183: mol_type = other DNA
  misc_feature 1..183: note = Synthetic
acggaccacccccctatacacaggtataactcctggctggtgttgctttcactcgatctgttattatctataaaaaacttagggtcaatgcctttccctgctgttattgtggtggcttttttgttggtttatttcaccattaggcttctgctcatttattgcatacctaactcgagaagctaa

SEQ ID NO: 15369 - DNA, 684 bp, unidentified
  misc_feature 1..684: note = Synthetic
  source 1..684: mol_type = other DNA
atattagtgttggccgccgccttccccgtcttgatggcttctgagctcttctcctcactccctggcggggttgcctccgctgccatttctgccggggctcaggctgccttgcaggaccaggcctaccggcagagtttggagttgcaggcccgctctttttcccatgattccgccatgttgcagcagcaagtccaggccacccagatggcccgctcccagtggtttgatttccaacgggctgccctgcagggcgctggcttttctgacgctgacgccacgcgtctggtcctgggggcttctcccacaaccctggtcgactggaacggcactcggctcgctgccccgcaagcccgggtgactacctccttttctggtggcttcctccccagcatgccccaggctggcgcacagagatcccaaagtcctgaaccatctgccccgggcgcccccactcgagtatcttcttggctgtcttctattgagcctttccacccctctgcattacagacagtttgggttactccccctggatccacggccacttctcaggtctcttcccagcggccttcccgctcttctgcctcttctgtggctagtagtgcctcctatactagctcttttaatcaagggtggtttaatacagatcggatgccattgttcgcaaaccttggcagacgattttga

SEQ ID NO: 15370 - DNA, 684 bp, unidentified; identical to SEQ ID NO: 15369
  source 1..684: mol_type = other DNA
  misc_feature 1..684: note = Synthetic

SEQ ID NO: 15371 - DNA, 270 bp, unidentified
  misc_feature 1..270: note = Synthetic
  source 1..270: mol_type = other DNA
ctgccggggctcaggctgccttgcaggaccaggcctaccggcagagtttggagttgcaggcccgctctttttcccatgattccgccatgttgcagcagcaagtccaggccacccagatggcccgctcccagtggtttgatttccaacgggctgccctgcagggcgctggcttttctgacgctgacgccacgcgtctggtcctgggggcttctcccacaaccctggtcgactggaacggcactcggctcgctgccccgcaagcccgggtga

SEQ ID NO: 15372 - DNA, 270 bp, unidentified; identical to SEQ ID NO: 15371
  source 1..270: mol_type = other DNA
  misc_feature 1..270: note = Synthetic

SEQ ID NO: 15373 - DNA, 54 bp, unidentified; identical to SEQ ID NO: 8402
  misc_feature 1..54: note = Synthetic
  source 1..54: mol_type = other DNA

SEQ ID NO: 15374 - DNA, 1923 bp, unidentified
  misc_feature 1..1923: note = Synthetic
  source 1..1923: mol_type = other DNA
atgaactacttcatgccgctgcgcaacatctggaaccgcgtgcgcgagttcccacgtgcatccaccaccgcctccggtatcacctggatgtccaggtacatctacggctaccaccgcctcatgctggaagacctcgcccccggagccccggctacagagcgatggcccctgtaccgccagccaccgccacactttctcattggctaccagtacctggtgcgcacctgcaacgattacatctttgacacccgcgcatactcgcgcctcaagtacaccgagctcgtgcgccctgggcaccagacagtcaactggtcagtcatggccaactgctcctacacaatcaacaccggggcctaccaccgcttcgtggactttgacgacttccaagccaccctcacccaggtgcagcaagccatcctcgccgaaagggttgtagcggacctggcacttgtccagcccatgcgcgggttcgggatcactcgcatgcatggcagagcgggcgaagaagaagtgcccgtggaacgactcatgcaagactactataaagatctggccagatgtcaggataatgcttggggaatggctcatcgcctgcgtatccaacaagccggacccaaagacctggtgctcctcgccaccatccgccgtctcaaaactgcctattttaatttcatcaccagcagcatcgtctcaccctcccaagaggaggaaggagaagaaagagagaaccccgaccgagcgtctagccgcccccgcccgcaagaaacagtgctcagcctaccttgcgattgcgactggttagacgctttcgtcgaaaggttttcagatcccgtggatcttgagacgatcaggtccttgcgcggagtacctacggggcaattgataaaatgcataatcagcgcggtgtccctgcccaacggagagcctcccagtcaccacttcagggagatgcgcggaggcgtcttcactctgagacccagggagaacggtcgtgccgtcaccgagaccatgcgccgccgccgcggagaggtcattgaaagattcatcgaccgtctgcccgtgcgccgccggcgtcgccgcgttccccctcctcctgcagccccacctgaagaggaagagatgttagtggaagaagaagagattgaggaagaaatcccaggggctttcgagcgcgaggtgcgcaccaccatcgccgaacttatccgtcttctggaagaggagttgaccgtgtccgcgcgtaactcccagttttttaactttgccgtggacttctacgaggccatggagcgcttggaagcgctgggcgatgtcagcgagatgccgctgagacgatggatcatgtatttcttcgtcaccgagcacatcgccaccacactcaactaccttttccagcgcctatgcaactatgcggtcttcacccgccacgtggagctcaacctcgcccaggtggtcatgcgcgcgagagatcccgtgggggctgtggtctacagccgcgtctggaacgaggcgggcatgaatgcattctctcaactcattgggcgcatctccaacgacctcgcggccaccgtcgagagagcgggccgcggagatcttcaagaggaagagatcgagcagttcatggccgagatcgcctaccaggacaactctggcgacgtgcaagaaatccttaggcaagccgccgtcaacgataccgagattgattctgttgaactctctttcaggttcaagctcacggggccggtagctttcacccagaggcgtcagatccaggatgtcaaccgccgcgtcgtcgcgcatgcgagtcttctcagggcgcagtaccagaacctacccgcgcgcggcgccgacgtaccactgccagccatgccgccgggtcccgagccgcccctgccgcccggtgcgcgccctcgacaccgcttctaa

SEQ ID NO: 15375 - DNA, 3582 bp, unidentified
  source 1..3582: mol_type = other DNA
  misc_feature 1..3582: note = Synthetic
atggccttggttcaagctcacggggccggtagctttcacccagaggcgtcagatccaggatgtcaaccgccgcgtcgtcgcgcatgcgagtcttctcagggcgcagtaccagaacctacccgcgcgcggcgccgacgtaccactgccagccatgccgccgggtcccgagccgcccctgccgcccggtgcgcgccctcgacaccgcttctaaacatgcaagaagcaacagagccaccgccgtccaaaatgaaaaacaagggcacggtggtagcgcccaagggacacggaaccctgcaagccatcgacatctccaccaacggacccgttgagatcaagtactatctgaacctccctcacgccctccaaaagatcatgcaagttaatctcctgacactgcctactaacctgactccgcagcgtctcaggaccctggacagctccggcctgcgcgctctcgtcctcgagctccgcccctgccgcgccgaggtctggacttgcctcccgcgagggctcgtcagcatgaccaccatcgagacagaagatggtcatgccgatgcagacaacatagtaaagcgcgaggtacaagcgccaggcctcaattttccactgaaatttctcgtcaaaggaagtcaggtacaactcattcataaggtgcatcccgtgaatcgctgcgagtactgcggccgtctgtacaagcacaagcatgaatgctcggcgcgtcgcagggagttctacttccatcacatcaacagccattcctccaactggtggcaggagatccagttcttcccgattggctctcatcctcgcacagaaaggctctttctcacctacgatgtggaaacctacacctggatggggtcctttggcaagcagctaatccccttcatgctggtcatgaaactctctggagaccagcggctcgtcaacatcgcctatgacctcgccataaaactcaagtgggatcgctggcggcaggacccccaaaccttctattgcgtcaccccagaaaagatggcagtcggacagcattttcgtcagtaccgggaccagttacaaacagcactggcagtggacctctggtcctccttccttaaagcgaaccctcacgtgcacgaatgggccctcgaacactatgctctcactgaccctacagatctcacttttgaagaactcaagaagctgcctcatgtcaggggcacccctcgattcttagaactgtacatagtggggcacaacatcaatggctttgatgagatcgtcttggccgctcaggttatcaataaccgagcagaggttcctcagcctttcaaaatcacccgaaatttcatgcccagggccggcaagatcctcttcaatgatgttactttcgctttgcccaaccccgcctacaagaagcgggtggacttccaactctgggaacagggggcctgtgatgacatcgacttcaagtatcaattcctcaaagtcatggtcagggacacttttgccctcactcatacctcgctgcgcaatgcagcccaagcatactctctcccagtggagaagggatgctgtccctacaaggcagtcaatcagttctacatgttgggctcttaccgtgcagaaaaagacgggtttcccctcgaagagtactggaaggatcacgaagaataccttctcaaccgcgagctgtgggaaaagaaaagccaaccgcgttatgacatcatccaggaaactctcgactactgtgccctggatgtactcatcaccgccgagctggtagccaagctgcaagagtcatatgcccacttcataagggactctgtaggcttacctcatgcccattttaacatattccagagacctactatctcttccaattcccatgccatctttcgccagatcgtttacagggcggaaaaacccaaccgcaccaatctgggcccgggtcttcttgccccctcacatgaactctatgactatgtgcgagcaagcatcagaggggggcgatgttatcccacttacatcggcatcctcgaagagcccctctatgtctacgatatctgtggcatgtatgcctccgcgctcacccaccccatgccctggggcacccctcttaacccctatgagcgcgcgctggcagttcgagaatggcagatgaccttggatgatcccgccaccatcagctattttgacaaagatttgctaccgggaatatttaccatagatgcggacccccctgatgagttcatgctagaccccctcccccctttctgttcaagaaaaggaggtcgactctgctggaccaatgagcccctccgaggcgaggtggccaccagtgtggatctgataaccctgcacaataggggatggcgaatcagaatagttccggatgaactgacaaccatctttcctgaatggaaatgtgtggcgcgcgagtacgtccagcttaacatcaccgccaaggagcgcgcggacaaggaaaagaaccaaaccatgcgctccatcgccaagcttctatccaatgccctctatggatcatttgccaccaagctggacaacaagaagattgtgttttctgaccagatggacgagagtcttatgaaaggcatctctgctggtactgtcaatatcaaatcctcctcgttcctagaaactgacaacctgagtgcagaggtcatgcccgccttcgagagggaatacctaccccaacagctggcgctcctggacagcgatccggaagacagtgaggacgaacagaggcccgcccccttttatacccccccggcggggacccctggtcacgtggcctacacttacaagccaatcacattcttggatgtggaggagggggacatgtgtttacataccgtagagaaggtggaccccctggttgacaacgaccgctacccctcccacgtggcctcctttgtgctggcctggacacgcgcttttgtatcagagtgggctgggttcctctacgaagaggaccgaggcactccgctcgaggacaggcccataaagtcggtctacggggacacggacagcctctttgtcacccagcggggacacgaactcatggaaaccaaaggtaagaaacgcatcaaaaaacatggcggaaaacttgtttttgaccccgatgagccggatctgacctggctcgtggagtgcgaaaccgtctgcgcctcctgcggtgcggatgcatactcccccgaatccattttcctcgcgcccaagttgtatgccctcaaatgtatctactgccccgcctgccataaaacttccaaaggtaagctccgtgccaaaggccacgcggccgaggcgctcaactacgaactcatggtaaactgctacctggccgacatgcagggcgccaatcggcagcggttctcgaccagcaggatgagtctgaagcgcaccctcgcaagcgcccaaccaggcgcgcaccccttcaccgtgacggaaacaaccctgactcggacgctgcgaccatggaaggatcggaccctggcagcgctggacgcccatcgtctgattccctactccaggagccgtcccaacccgcgaaacgaggaggtctgctggatcgagatgccatag

SEQ ID NO: 15376 - DNA, 15 bp, unidentified
  misc_feature 1..15: note = Synthetic
  source 1..15: mol_type = other DNA
atgtacaataactga

SEQ ID NO: 15377 - DNA, 540 bp, unidentified
  misc_feature 1..540: note = Synthetic
  source 1..540: mol_type = other DNA
atgtcgcgacttcaaatactgacctcatttggacaaatctacgcacccgacgaagctcggctgcgcgagatcgcgcgtgacttgggaatatgcaccataaaacgcgcattcggcgacatgctgtacggctttatagacttcaacccggtgcccctgacccaagtaaacatgctcatgtccaactgttacttcgcggtcaacggcaacctgcttccgtgcacggaggacttccggctcagactcccggcgacggagatctctgcggcctacctgacgaaaacgggacggacgatcctgtgcggcaaagacttcaacataatagcgccgttggggttcaagccgtccatgcggctgcgcaacctcagtcacgtgtctgcgcttgtagagatcttggagttttacagcgagtccggggagtaccaatttgtgctcggccccagcgcgcagttcatgctgcgtctgatggagaaggagaacgtctgtctgttcggcagcggttggtgcatagtggacctgcgcaagctagacgtaactatataa

SEQ ID NO: 15378 - DNA, 585 bp, unidentified
  source 1..585: mol_type = other DNA
  misc_feature 1..585: note = Synthetic
atgtctattctcatctcgcccagcaataacaccggctggggtcttactagacccagcaccatgtacggaggagccaagaagcgctcccagcagcaccccgtccgcgtccgcggccacttccgcgctccctggggcgcttacaagcgcgggcggacttccaccgccgtgcgcaccaccgtcgacgacgtcatcgactcggtggtcgccgacgcgcgcaactatacccccgccccctccaccgtggacgcggtcatcgacagcgtggtggccgacgcgcgcgactatgccagacgcaagagccggcggcgacggatcgccaggcgccaccggagcacgcccgccatgcgcgccgcccgggctctgctgcgccgcgccagacgcacgggccgccgggccatgatgcgagccgcgcgccgcgctgccactgcacccacccccgcaggcaggactcgcagacgagcggccgccgccgccgccgcggccatctctagcatgaccagacccaggcgcggaaacgtgtactgggtgcgcgactccgtcacgggcgtgcgcgtgcccgtgcgcacccgtcctcctcgtccctga

SEQ ID NO: 15379 - DNA, 414 bp, unidentified
  misc_feature 1..414: note = Synthetic
  source 1..414: mol_type = other DNA
atgggacaaacacctcagcctacccaagcgctacttgacacaggagccgaccttacggttataccccagacactcgtgcccgggccggtaaagctccacgacaccctgatcctaggcgccagtgggcaaaccaacacccagttcaaactcctccaaacccccctacacatattcttgcccttccgaaggtcccccgttatcctttcctcctgcctcttagacacccacaacaaatggaccatcattggaagggacgccctacaacaatgccaggggcttctatacctcccagacgaccccagcccccaccaattgctgccaatagccactccaaacaccataggcctcgaacaccttcccccacctccccaagtggaccaatttcctttaaacctgagcgcctccaggccttaa

SEQ ID NO: 15380 - DNA, 99 bp, unidentified
  misc_feature 1..99: note = Synthetic
  source 1..99: mol_type = other DNA
gtgggcaaaccaacacccagttcaaactcctccaaacccccctacacatattcttgcccttccgaaggtcccccgttatcctttcctcctgcctcttag

SEQ ID NO: 15381 - DNA, 27 bp, unidentified
  misc_feature 1..27: note = Synthetic
  source 1..27: mol_type = other DNA
atggatactgccttgttaagagcttaa

SEQ ID NO: 15382 - DNA, 618 bp, unidentified; identical to SEQ ID NO: 11377
  misc_feature 1..618: note = Synthetic
  source 1..618: mol_type = other DNA

SEQ ID NO: 15383 - DNA, 1284 bp, unidentified
  misc_feature 1..1284: note = Synthetic
  source 1..1284: mol_type = other DNA
atgaattcaacaccagtctctgaattatcgcaattaattcagtttactgtggattttaatgatttgcagccagaactcaatttttctcccgcagagattacctgcatactttcgcacgaaagacctgtactgttgctaattaccgatggaactgaaaacaatgcagaatgcgtaactttggtgggtcacgttctaaaaaacaaaaaagtgatcaaaattaatgtttttcctatgatacaatcgataaactttgtcaatatttttgccctgccaatttttaacattacgtcatccctgctgatacaagataattgttactttaaagaaaatatggatcctcttagatttcatcaatttgcctatcttgaaaagggtttaggaacaactcctataattttatattctgtgaaaaatggtgatctgatcgtaaatgccacagtaactaaaattacttgggaaaagaatgaatttcaacctttactgaaaaactccaatgatcaaagactggaaaccatgtactgcatcttcaccttcaatacaacatactgcaaatattggaatgtttttttcgcgagcgcaacgccaatctgcaacgtggaaatgatatcagaacacaatgtttcggtgtacaagattgaatatcgatcaccggtgttatttgtctttctacggtatcttaaagtaatgaattcacgtttctgtgtggatgagtgttctttacgcttaagattttctaaaccaaatatgcaatcagttgcacttaacatttgcatgccgtatttcaatatttctgaagaattcaaaacaatggaaatttatttccctgaaagaatgacactgacacctaatcacatcacacaaatcaatttacgaggaacctttgagaatcctgctgctgtagggctattcattccaaagaaatctaatgtactctcatttcctttcatttggcaaccgcgtgagacttttagaatttacgtgtactgccgaaatgagacatttgtaacggagcatgatataattggtcatgtctactttatcagtagagaacaatttccacattctttccatcctacagcacacgcagattgcaaatcaaaagttgaagccgctttcaattcatttcgaattaactttttagggaacgattttttttcagactctctcccaattttgacagttcatcccatgacagactttccctacgaacaaatacaagagacagaaaacattagacataactctatgaacataacaccccgcttcaaacgtatgcaattgtaa

SEQ ID NO: 15384 - DNA, 78 bp, unidentified; identical to SEQ ID NO: 8414
  source 1..78: mol_type = other DNA
  misc_feature 1..78: note = Synthetic

SEQ ID NO: 15385 - DNA, 1188 bp, unidentified
  misc_feature 1..1188: note = Synthetic
  source 1..1188: mol_type = other DNA
acggttaccttcttgcccacgccgtcgcttatcttgcaaacggtacgcagtcactgcgtgtcaaaaatcacttttaacagctcatgcctctacatcactgacaagtcgtttcagcccaagaccattaacaattccacgccgctgctgggtaatttcatgtacctgacttccagcaaggacctgaccaagttctacgtgcaggacatctcggacctgtcggccaagatctccatgtgcgcgcccgatttcaatatggagttcagctcggcctgcgtgcacggccaagacattgtgcgcgaaagcgagaattcggccgtgcacgtggatctagatttcggcgtggtggccgacctgcttaagtggatcgggccgcatacccgcgtcaagcgtaacgttaaaaaagcgccctgccctacgggcaccgtgcagattctggtgcacgccggtccaccggccatcaagtttatcctgaccaacggcagcgagctggaattcacagccaataaccgcgtcagtttccacggcgtgaaaaacatgcgtatcaacgtgcagctgaagaacttctaccagacgctgctcaattgcgccgtcaccaaactgccgtgcacgttgcgtatagttacggagcacgacacgctgttgtacgtggccagccgcaacggtctgttcgccgtggagaattttctcaccgaggaacctttccagcgtggcgatcccttcgacaaaaattacgtcgggaacagcggcaaatcgcgtggcggcggcggtggtagcggcagcctctcttcgctggctaatgccggcggtctgcacgacgacggcccgggtctggataacgatattatgaacgagcccatgggtctcggcggtctgggaggaggtggcggcggtggcggcaagaagcacgaccgcggtggcggcggtggttccggtacgcggaaaatgagcagcggtggcggcggcggtgatcacgaccacggtctttcctccaaggaaaaatacgagcagcacaagatcaccagctacctgacgtccaaaggtggatcgggcggcggcggcggaggaggaggcggcggtttggatcgcaactccggcaattacttcaacgacgcgaaagaggagagcgacagcgaggattctgtaacgttcgagttcgtccctaacaccaagaagcaaaagtgcggctag

SEQ ID NO: 15386 - DNA, 45 bp, unidentified; identical to SEQ ID NO: 7482
  source 1..45: mol_type = other DNA
  misc_feature 1..45: note = Synthetic

SEQ ID NO: 15387 - DNA, 1452 bp, unidentified
  source 1..1452: mol_type = other DNA
  misc_feature 1..1452: note = Synthetic
atggagaatcagatcaaggcaaacaataaaaaagagtttgatgagtggtttaaaccttttagtgaaaagctccaattaaggtcaaacctcacaaactctgcatccctgtgtgatagagtacctgacctagctctagcagaaatgaaaatggcccttgccacagatgataaagaaaaagactcaatcttttctaatgctctggtggaggcaacacgtttctgtgctccaatctatgagtgtgcttggacctgcagtacaggtgtagtgcagaagagcttaagctggtttgataagaacaaagacttcatcaaactctgggacgcaaagtacatggatctcaaaaagggtatccctgaaccagagcaactagtttcataccagcaggcggcccaaaagtggagaaaggacgttggttatgaaattaaccaattcacaaggtctctcacacatccagttgttgcagagtacaaagtgcctggagaaattgctgttgatgtcaaagaaatgctgtctgacatgatcaggcgcaggaatgtcctgctgaacggagacggagaaaatgctgggaaaaaaggtcctatcagcagagagcatgtctcttggggccgtgagttggcaggaggaaagttccaagttgtgtttaaccctccttggggggatataaacaagtgtggtaaatcaggcattcctctagcagctactgccatggtgaaggttgctgagctagatgggtcaaagaagcttgaagatataaggcaggcccttctggatctaaaaaaatgggttgaagataacaaggatgcactagaggatgggaaaggcaatgagctcgtccagactatgacaaagcatctggctcaagcagtggaactatccaaaaagtccaatgccctgcgtgcacaaggagcacaaatagacactcctttctcagcctattattgggcttggagcgctggtgttaagccagagacatttttcactttgtctcaattcctctttgagatgggccagagtgctagaggaggcaaaaaaatgatcaaagcactgacttccacaccactaaggtggggcaagggattgattaacctgtttgcagatgatgactttttgggcaacagactatacatgcatcctgcagttctgactcctggtcgaatgagtgaaatgggtgcatgctttggggttattcctgttgcaagcccagaagatgcaatcctaggttcaggacactcaaaaaacatactgaacttcaaaattgataccagtgtacagaacccatgtgcatccacaatcgtgcaactgtacagaatccagaaatctggctttgatctagaaagcttagaagtagtgtctactgaacatcttttgcaccagtcatttgttggtaaaagatgcccaacccagaatgcttacaaggtgagaggaaatgcaaccaatgttaacatcatctaa

SEQ ID NO: 15388 - DNA, 48 bp, unidentified; identical to SEQ ID NO: 8418
  misc_feature 1..48: note = Synthetic
  source 1..48: mol_type = other DNA

SEQ ID NO: 15389 - DNA, 1458 bp, unidentified; identical to SEQ ID NO: 13670
  misc_feature 1..1458: note = Synthetic
  source 1..1458: mol_type = other DNA

SEQ ID NO: 15390 - DNA, 4290 bp, unidentified; identical to SEQ ID NO: 13414
  misc_feature 1..4290: note = Synthetic
  source 1..4290: mol_type = other DNA

SEQ ID NO: 15391 - DNA, 138 bp, unidentified
  source 1..138: mol_type = other DNA
  misc_feature 1..138: note = Synthetic
atggcaactgcttctaccatagccttgctgagctctatataccaaaaaagactgagcactcttacaggttggtcaaggccgaactcaaacaggccgcagaggtgtactttggaacagagcctgaggccgtggcgctag

SEQ ID NO: 15392 - DNA, 153 bp, unidentified; identical to SEQ ID NO: 8422
  source 1..153: mol_type = other DNA
  misc_feature 1..153: note = Synthetic

SEQ ID NO: 15393 - DNA, 153 bp, unidentified; identical to SEQ ID NO: 8422
  source 1..153: mol_type = other DNA
  misc_feature 1..153: note = Synthetic

SEQ ID NO: 15394 - DNA, 369 bp, unidentified
  misc_feature 1..369: note = Synthetic
  source 1..369: mol_type = other DNA
atgaagtccgtattatactcgtatatattgtttctctcatgtataataataaacggaagagatatagcaccgcatgcaccatccgatggaaagtgtaaagacaacgaatacaaacgccataatttgtgtccgggaacatacgcttccagattatgcgatagcaagactaacacacaatgtacgccgtgtggttcgggtaccttcacatctcgcaataatcatttacccgcttgtctaagttgtaacggaagacgcgaccgtgtaacacgactcacaatagaatctgtgaatgctctcccggatattattgtcttctcaaaggatcatccggatgcaaggcatgtgtttcccaaacaaaatgtggaatag

SEQ ID NO: 15395 - DNA, 369 bp, unidentified; identical to SEQ ID NO: 15394
  misc_feature 1..369: note = Synthetic
  source 1..369: mol_type = other DNA

SEQ ID NO: 15396 - DNA, 165 bp, unidentified
  misc_feature 1..165: note = Synthetic
  source 1..165: mol_type = other DNA
atgcaccatccgatggaaagtgtaaagacaacgaatacaaacgccataatttgtgtccgggaacatacgcttccagattatgcgatagcaagactaacacacaatgtacgccgtgtggttcgggtaccttcacatctcgcaataatcatttacccgcttgtctaa

SEQ ID NO: 15397 - DNA, 165 bp, unidentified; identical to SEQ ID NO: 15396
  source 1..165: mol_type = other DNA
  misc_feature 1..165: note = Synthetic

SEQ ID NO: 15398 - DNA, 1545 bp, unidentified
  misc_feature 1..1545: note = Synthetic
  source 1..1545: mol_type = other DNA
atgtctgagctgaactttaaggatttgaacggcctcaacaactggtttgaggagttcaaaaaagatgtacccatttacacatcaggtgcaaattcagcctgtctgagttccggtttagttgacttaagtcaattcaaactggagattgatgctcaatcatcagagagtgccaagaatgctgtttatggcagagcagtaattgctgcaactaggaatttggcaccaatttatgagtgtgcttggacatcatgtgagggcatctttgaaagatcaatgtcctggttcaatgacaatgctgacaagccagaatttaaagtctggcatgataaatacaatgacctgaagtccaacttgcctgaagtggagcagattcttgcttatcagaactgctcaagcctttggcgcaaggacataggttatgagatcaaccagaacaccagtactctgaaaggagacatagttgaagaatatggtgtcaaccgaaacatagtcggcactgttaaaaatatgcttgtggatatggtcaacaagagaaagaaaagactggggggagttgtgatcacaggtgcagggacgtcagaagaccacatcacctggatggagaactggttagatggagaaatagaatcttttagtatcccaggctggggcagctgggcaaagcagaattcaaagggaactagacttgcaggaacagcaattgccaacattatgcagaagaaggactcagatgcacttgaaaaggccaaagaaaaattggaaaagatgaagaagactgctgatgatccagcatcgctggagtctgaaggcatgagtgaggatgcagccaaaaaaatgtgccaggaggttgaagcctcaattgaagaagcagaggtactcctaggcacaaatgttgcacaaggggagtctaaatatcaacagcaggctgctgcaatggatgttcctttctcggcacactactgggcatggagatgcaaggtgaatgagaacagctttcctgcactctcccagtggctcttcgaactggggcagagaccaattggtgctgctaaaatcaacacaatgcttggagaactgcctttcatctgggccaggaatataagaggctcctttgccagttccaacttcaacggcaataaaatctatatgcatcctgctgtcttgacagctggaagattgtcagatatggccgcctgttttggggcttttcccgttgcaaacccacagagggctgctgaaggcaccggtaacactagatacttgctgaatctgaaaagagagggtgataatccctgtgcttcaatggtaacatctctttttgatgttttttcagcaggctttaaataccaggacatggacattgtgcctccagaacacatgcttcaccagtcttttttagggaagacaagcccatttcagacagctaacaagatcaaagggagcttcacgaaaatcaatgtggttgctgctcccaataagccgactccttatgtattcacccctgcctctgccaagaaaatcaaggaaaagaaggctagaaagtaa

SEQ ID NO: 15399 - DNA, 4899 bp, unidentified
  source 1..4899: mol_type = other DNA
  misc_feature 1..4899: note = Synthetic
ttgagagttgtcagaatggtgtcgttggaaaaagggttgatcctcttgctgctgatgcacatcgcaattgcctccaccggagggtcccttgggttgcctggcctaaatggtgaggaccacactgacgatccagaggttggtggcgatggtccaactgaggagtacacagaagatgaccctgaatcaacaacggtctcgatacctacgactcccccagtcttaggacaggggacagaagaggtgcctgcaacttctggagaggcggaagcagggtattctaccacggatgtgccggacactgtgtctgaaaaggtggaagatgaacaggacacgacccctagcacgcaggtgaccccagaccagccagaacaaagtacgactagtttgcctgacccctggacagcaatctcgacaaggattggtagggagctattaagcgtggagtctgacaccacaaagtcaagcttggtcactgtaggacatcctcaacagccaatattcttggatgggcagccggtagaagaagtgactcatccagtcaatgaaagagacgttactgaagctctgaggaagtatgacaaaatgaaaaaactgcttagccaaagaattttatcaaaaatgggcatggccagagacttcacagatgaggagttagacgtctggtgtcacgagcggtttgacaactgtagctctaatgacattgaaaatagaatcagggatttttttctcatcagtgatcagactgagtgctttgatgaagtgctagtgaaaaggctatgtgaatcaaccaaccctattgtaggcgagccttggcaggtggcaggtatcaaggaagaaattgttcggagagaaatgggtagaagaatctttagattcttcactccaactttgaaggtgacatgtgtgtcaggctcattgaatccttcagaccagtttgtgaggttctatgatcctgtcatagaacgaacttcaggccccactatccaaaactatgatagcatgcactgcttaaacatagagaatgggttagctaaaccatccaaaatggttgttcttaatgtattaatgacaacagtagaggttagactggaatcctgccgtgcgttcataaatgcacatcaatgcatttacacacaacatgcagatgggcaagtgatggtgcccactttcgtggaccacagtggtacaaggagaaccattggtgcgtatacaatgagcttcaacttgactgatgaaagaaatagagcatgcatcatcagaacaacttgtgtggtcaaaggaaaagaggtaaagaagggacagagtcaattgagaggtttcccaacaagtatcagactcttcaagtctgtgacaggcaaaagaaggctcatggcagaagaaggagactggactgactgcggatctggcacacagcttgatatgacaatggctgtgtctgtacacaatgacaaaaaaggaggacctggtaagaagctcaccatatgcaatggtaccacagtctcagattcaacactcaatgaagggcttggatgttacacgattaacaaggtgataacaggaaaggcatgcaaagtaggaaactccacaggatcctgtgaggtgcaaacagagctacagaagtgcgagactggaaaatgcatactggtgaaacagaaaagcaaaggagtggtgaaactgaaaagaggaaagactgtaatcataactgaatgccaaggaagctgcctctttgccatcccacaggacacaggagacatcacaattgactgctctggaggaaggcagcattacctggaaattaatatagttgacatacactgtccagggaaagacaaatggaaagggtttatgctctacatatgcagggtgtcaagcaggcctttaattgccttgacatttggattgtggcttgcagcaggctatctaataacatgccttgtttcctttatcatctacaatgctgtcctacttcttagtattgctatcaaaaaagtgaggcaagggagagaaaagaaaggagacctgtgcataaaatgtgaacagcactgcatgaacctgtatgatcaagaactacatgaactgaactgcagcttcaacctctgcccgtactgtgccaataggctttcagatgaaggactacccagacacgtaccaagatgcccaaaaaaatcagaaagattggaggagattgagctctacatcaattataccagggtcccgtgcattctgagatggatactatcaacctctgtccaagtagggacggccgtgaagagactgtcttggttcagtgtgctagtaaccctttttattctgacaatttcaccggtgcagggattcccattggagagtccacctattggcgcagcaactgacagtagaatcatgtatggggtagtggggttcatgtttgcactaataatgatgcttaatcttaaaaaatcacactacggttccatctttcatgtgatcgatggcttcggacgttgcaatctctgtgacacaagaattgacagcttgatggaagaaactgcccacgatctctgttgcatgtttgactgttgcccctactgtcaccgagtgtcagaaagtaatggatcccactgcttccacgtgaggatatgtgtggccaaagagatttccaaaaagatgttgaaggcaggaggaagattgttcaccaacaaacttgtctctagagaagggacttttgccaacaggatccaactcctttatagaaggtccaaagttgtaagcacacttgtggttacagtccttctacttcttgtccttttgaagccaaccactgcctttgactcaggcccccttcccgacggcacctgggaagaagaagaaaaacttgtcaggaactgtggacaagaatgcattctagatcaaggcgagtgcctatgcccaggagagcacagagccgggagaaaactccttttcctaaatgggctccaagacgccgcacgtagaatgactgaatctcacagactcctcacaagtgtttccatagacgccccctggggtgcaataaatatagagtccactttcaagcctgtacttgctgcatcaaacatcgacctgagctggaactcagcagaagaacaaggagacaagattatactttctggaaggtcaacaggaatcataaaactccaggaaagaactggtctgatgtggaagatgtcatcagaaaaggcatcagaaagcaaaaaccttcttgtttcagtgatggatttttcccagctctacaattccatatttcagtatataacgggtgacaggagtctttcagaatggccaaaagctgtctgcacaggagattgtccggataggtgcggctgtcaaacatctacatgttaccacaaagaatggccgcacactagaaactggagatgcaatcccacttggtgctggggcatcgggaccggttgcacctgctgtgggatggatgttgagaggtactttaataaatacttcggtgtgaaatgggccttagaatatgttagaactgatgtagtagtgtgtgtggaactcacaaatgaggaaagacattgtgaccttgtgcaggccggaagccgcttttccataggtcctgtgtctgtaactctgtctgacccccagaatgtggtgaaccgtctctcgagcaacatcatgacaattcaagaaattgctgataacggcatcttggacttgatgcatgtgagcaaagtcatatccgcagagaatgcctgcaaacttcagagctgtacacatggaagcccaggagatctccaaatccttcacactgacaacctaataaagggtgacatgtcaggaggtatcaacctcgctcacctggacccacaagtcaatacaagctggatgtcgtgggaaggttgtgacttagattattactgcacagttggtgattggcctagctgcacgtacaccggagtgaattctataaatacagatagtttcaccaatctcataaacacagagaccgattacacaggcaagttccactttcactccaaaaggatttcagctagagatgacactttgcaaatggatctgaaagcaagacctaactccggaggcggtgaaatgacagttttggtagaggttaatgggttggagctgcattcaaaaaggataagtctcaaagggctacggctaactaatttgaagtgtgatggttgctttgcctgcagtcaaggcctgacatgcacgataactgcaaagttagagtcaccggacgaatttaccatccacctgagaagcaccagtagggacgtggtggttgctgagaccagtgtaacagccaggaaggtagagacaggagctaggagcggcttcagagcctttgcagtaagggatgtaaagaagttgtgcctggaagtggttgagaaggactactgtccttcctgcaccgtagaagatttgaagatatgtgttgatgtgtctcttgagccccctaaagacatactcattgagcacaaagggaccatcatacagcactacaacaaaagttgtgatgagggatataattgctgggttggatctgtttctggattctttgttggagtgaaagacttttttgaaaagaaccttggaggtgtacttattggtcttgtaagcacaatacttcctttagtgctgacagttctgttctttatttatggcaagaagctgttctgcctgtgccgactgtgccacaagaaatgttgtagaggctcaggaaggggaagagatggctacagtagattatcacaagaggaggaaatcaaggaaataataaaaaaattcagcaggaacggcgaactactagggaagggtgaaaatgacaaaagaactgtggcaaggatgttcatggatgggcaaagtacaaagaaggcaatcaaggaagtagcttaa

SEQ ID NO: 15400 - DNA, 117 bp, unidentified
  source 1..117: mol_type = other DNA
  misc_feature 1..117: note = Synthetic
atggtgaggaccacactgacgatccagaggttggtggcgatggtccaactgaggagtacacagaagatgaccctgaatcaacaacggtctcgatacctacgactcccccagtcttag

SEQ ID NO: 15401 - DNA, 87 bp, unidentified; identical to SEQ ID NO: 3742
  source 1..87: mol_type = other DNA
  misc_feature 1..87: note = Synthetic

SEQ ID NO: 15402 - DNA, 1704 bp, unidentified
  source 1..1704: mol_type = other DNA
  misc_feature 1..1704: note = Synthetic
atggacttcgtgcggcggaagtacatgatacacgccatcgaccgcaacctcgacttcatgaaggccgaggtccagcagaaggtctccatcttctccctcgggcacgtgctcgcgctccactacctggtcaccgcctttccgcaggcggtcatcaccaaggacgtgctcgcgagcacgaacttcttcgtgttcgtgcacatgtcgcagcggcacgaggtcttcgacgccgtgctcaaggcagccttcgacgcgccgcagctctttgtgcgggcgctctcgcggcacttcgaggccttcgctgccgccatccaggcctaccgcgctacctgcgcggagctgctggccgacgcgcgcttcatggaggtggccgcgcgcgcggccgagctcgcggaggtcattggcgtgaaccacgacatcgccgctaacccgctcttcgcggacggcgagcccgtgcgcgacgcggagctcatcttcgcaaagaccttccgcaagaccgagttccgcgccgtcaagcgcctcgccgtgctgcggctgctggtctgggccttcctcgtaaagaaggaccttggtggcgagtacgcggacaacgaccgccaggacctgtttacgctgctgcagaaggccgcggggcccgtgcgccacagcgcgctcacagagagcatccgcgagtacctcttccccggagacaggcccagccactgggtctggctgaacgcgcgcgtggccgacgacgcggaggtgtaccgcgaccggcccgcgcgcacgctctacgagcgcgtgctcagctacgcgtactcggaggtcaagcaggggcgcgtaaacaccaacacgctcaagctcgtgtaccggctcgaggacgaccccgacatcaagggcctgctgctgcagctcatctacgacgtgcccgcggacatcgttggcgtcgtggactccgcgaacgaggagtggcggagctacttcgtgagtctgtaccgcgagaacttcgtcgacggacgcaccttcacctcggacgcgcgcttccgcgacgacctcttccgcgtggtcgccgccgtagagcccgacttcttcgagcccgagcgcatccgcgaggccttcagcgcagacgcgcggctgcgagagcgcttcacggacatggacctcaacaacgccttcatgtcgcacctcatctacgactccgtggaccccgacgtcgccgccgccgagcgcgggctttcgctgcgcgtgcacaacgaggactccgactacttcatccgggagtacaacacctacctcttcctcagcgagaaggacccgctggtgctggaccgcggggcgctcacgcggctctcggacgtccccgccgagcgcttccgcgacctcttcagcgacagcgtgttgcggtacttcctggacgcgaagctgggcacgctcgggctggtgctcgaggactaccgcgaggacgtggtcgccgccatgctccggcacctgcgccgcgtcgaggacgtgtcttccttcgtggcgtacgccgcgcgcaagaacccagcctgcgttcccggcgtcgtgcgcgcggtcgtgagcaacttcaaccccgcggtggtcgcggccatgcgccccttcctgcgcgagcacatgacgcgcgtggacgcgctgctggacggaatgccgcacctctcggaggccgaccgtcggtacatccgccgcgtggtgctgcagggccgcgcctga

SEQ ID NO: 15403 - DNA, 1638 bp, unidentified; identical to SEQ ID NO: 10539
  misc_feature 1..1638: note = Synthetic
  source 1..1638: mol_type = other DNA

SEQ ID NO: 15404 - DNA, 54 bp, unidentified
  misc_feature 1..54: note = Synthetic
  source 1..54: mol_type = other DNA
atgacgaggacccgcacctccggtggcggatgttcaacttctgcttgcgattaa

SEQ ID NO: 15405 - DNA, 2199 bp, unidentified
  source 1..2199: mol_type = other DNA
  misc_feature 1..2199: note = Synthetic
atggaggagcagccgcgtaagcaggagcaggaggaggacttaaccacccacgagcaacccaaaatcgagcaggacctgggcttcgaagagccggctcgtctagaacccccacaggatgaacaggagcacgagcaagacgcaggccaggaggagaccgacgctgggctcgagcatggctacctgggaggagaggaggatgtgctgctgaaacacttgcagcgccagtccctcatcctccgggacgccctggccgaccggagcgaaacccccctcagcgtcgaggagctgtgtcgggcctacgagctcaacctcttctcgccgcgcgtgccccccaaacgccagcccaacggcacctgcgagcccaacccgcgtctcaacttctatcccgttttcgcggtccccgaggcccttgccacctatcacatttttttcaagaaccaaaagatccccgtctcctgccgcgccaaccgcacccgcgccgacgcgctcctcgctctggggcccggcgcgcgcatacctgatatcgcttccctggaagaggtgcccaagatcttcgaagggctcggtcgggacgagacgcgcgcggcgaacgctctgaaagaaacagcagaggaagagggtcacactagcgccctggtagagttggaaggcgacaacgccaggctggccgtgctcaagcgcagcgtcgagctcacccactttgcctaccccgccgtcaacctcccgcccaaggtcatgcgtcacatcatggatcagctcatcatgccccacatcgaagccctcgatgaaagtcaggagcagcgccccgaggacgcccgacccgtggtcagcgacgagatgctcgcgcgctggctcgggacccgcgagccccaggctttggaacagcggcgcaagctcatgctggccgtggtcctggtcaccctcgagctcgaatgcatgcgccgcttcttcagcgaccccgagaccctgcgcaaagtcgaggagaccctgcactacactttcagacacggtttcgtcaggcaggcctgcaagatttccaacgtggagctgaccaacctggtctcctgcctggggatcctgcatgagaaccgcctgggacagaccgtactccactctaccctgaagggcgaggcgcggagggactatgtccgcgactgcgtctttctctttctctgccacacatggcaagcagccatgggcgtgtggcagcagtgtctcgaggacgagaacctgaaggagctggacaagcttcttgctagaaaccttaaaaagctttggacgggcttcgacgagcgcaccgtcgcctcggacctggccgagatcgtcttccccgagcgcctgaggcagacgctgaaaggcgggctgcccgacttcatgagccagagcatgttgcaaaactaccgcactttcattctcgagcgatcggggatgctgcccgccacctgcaacgctttcccctccgactttgtcccgctgagctaccgcgagtgtcccccgccgctgtggagccactgctacctcttgcagctggccaactacatcgcctaccactcggacgtgatcgaggacgtgagcggcgaggggctgctcgagtgccactgccgctgcaacctgtgctccccgcaccgctccctggtctgcaacccccagctccttagcgagacccaggtcatcggtaccttcgagctgcaaggtccgcaggagtccaccgctccgctgaaactcacgccggggttgtggacttccgcgtacctgcgcaaatttgtacccgaggactaccacgcccatgagataaagttcttcgaggaccaatcgcggccgcagcacgcggatctcacggcctgcgtcatcacccagggcgcgatcctcgcccaattgcacgccatccaaaaatcccgccaagagtttcttctgaaaaagggtagaggggtctacctggacccccagacgggcgaggtgctcaacacgggtctcccccagcatgccgaggaagaagcaggagccgctagtggaggagatggaagaagaatgggacagccaggcagaggaggacgaatgggaggaggagacagaggaggaagaattggaagaggtggaagaggagcaggcaacagagcagcccgtcgccgcaccatccgcgccggcagccccggcggtcacggatacaacctccgcagctccggccaagcctcctcgtag

SEQ ID NO: 15406 - DNA, 684 bp, unidentified
  misc_feature 1..684: note = Synthetic
  source 1..684: mol_type = other DNA
atgtcgtctccatggtacacctggacgtgttgcggtataaacctttttggacgcggcaaccacgcttacaagcgcctcggtgaccctctggaaggctgtccagagcgctggcggcaagagatagatttgggcctcccccccggagtgtgtctgggtgacgttgtccagtcgaaccttggcacgacggcgctgcaccagacctaccttctggctgtacagtcaaacaagatcacagactacctgaagcgttttgacgtggctaaaattccggcgggctgccaggagaccgtgaaaacccaggtgaaaaaactgcagtctattcagaacgtcgtgtggaacacaatgctggccttggcggtcggcgagattaccgtggacgacagtgcgctccagtccctcttaaacaaaagggccggggaatgcgtttcgctcatggagatggaaaaactggcgactgctatggcgtcagacgactcggtaatatgggcctctgagatcagccactccttgtcggaacccacttctgtattgcctctcacgcctgccgttacgcgccagccggaggcaactttacccaagccacccaccgaagacccgtccgtttccgcgatgcattcgtcaatccctccccggccttcgtcaaccctggaagagacgacagaaagcgcgataggttcgacatag

SEQ ID NO: 15407 - DNA, 684 bp, unidentified
  source 1..684: mol_type = other DNA
  misc_feature 1..684: note = Synthetic
atgtcgtctccatggtacacctggacgtgttgcggtataaacctttttggacgcggcaaccacgcttacaagcgcctcggtgaccctctggaaggctgtccagagcgctggcggcaagagatagatttgggcctcccccccggagtgtgtctgggtgacgttgtccagtcgaaccttggcacgacggcgctgcaccagacctaccttctggctgtacagtcaaacaagatcacagactacctgaagcgttttgacgtggctaaaattccggcgggctgccaggagaccgtgaaaacccaggtaaaaaaactgcagtctattcagaacgtcgtgtggaacacaatgctggccttggcggtcggcgagattaccgtggacgacagcgcgctccagtccctcttaaacaaaagggccggggaatgcgtttcgctcatggagatggaaaaactggcgactgctatggcgtcagacgactcggtaatatgggcctctgagatcagccactccttgtcggaacccacttctgtattgcctctcacgcctgccgttacgcgccagccggaggcaactttacccaagccacccaccgaagacccgtccgtttccgcgatgcattcgtcaatccctccccggccttcgtcaaccctggaagagacgacagaaagcgcgataggttcgacatag

SEQ ID NO: 15408 - DNA, 2139 bp, unidentified
  source 1..2139: mol_type = other DNA
  misc_feature 1..2139: note = Synthetic
atggaggagcagccgcgtaagcaggagcaggaggaggagaacttaaccacccacgagcaacccaaaatcaagcaggacctgggcttggaagagccggctcgtctagaacccccacaggatgaacagaaggaaaccaacgctgggctggagcatggctacctgggaggacaggaggatgtgctgctaaaacacttgcagcgccagtcctttatcctccgggacgctctggccgaccgaagcaaaacccccctcagcgtccaggagctgtgtcgggcctatgagctcaacctcttctcgccgcgcgtgccccccaaacgccagcccaacggcacctgcgagcccaacccgcgtcttaacttttaccccgtctttgcagtccccgaggcccttgccacttatcacatcttttttaagaaccaaaagatccccgtttcctgccgtgccaaccgcacccgcgccgacgcgctcctcgctctggggcccggcgcgcgcatacctgatattgcttccctggaagaggtgcccaagatcttcgaagggcttggtcgggacgagacgcgcgcggcgaacgctctgaaagaaacagcagaggaacagggttacactagcgccctggtagagttggaaggcgataacgccaggctggccgtgcttaagcgcagcgtcgagctcacccattttgcctaccccgccgttaacctcccgcccaaggtcatgcgtcgcatcatggatcagctcatcatgccccacattgaggcccttgatgaaagccaaaagcagcgccctgaggacgcccagcccgtggttagcgacgaaatgcttgcgcgctggctcggaaaccgcgacccccagtccctggagcagcggcgtaagctcatgctggccgtggtcctggtcaccctcgagttggaatgtatgcgccgcttttttagcgaccccgagaccctgcgcaaggtcgaggagaccctgcactacacttttaggcacggctttgtcaggcaggcctgcaagatctccaacgtggagctaaccaacctggtctcctgcctggggatcctacacgagaaccgcctggggcagactgtgcttcactcgaccctcaagggcgaggcacggcgggactacatccgcgactgcgtctttctttttctctgccacacctggcagtcggccatgggcgtgtggcagcagtgtctcgaggacgagaacctgaaggagctggacaagcttcttgctaaaaaccttaaaacgttgtggacgggctttgacgagcgcaccgtcgccttggacctggccgaaattgtttttcccgaacgcctaaggcagacgctaaaaggcgggctgcccgactttatgagccagagcatgttgcaaaactaccgcactttcattctcgagcgatcggggatcctgcccgccacctgcaacgccttcccctccgactttgtcccgctgagctaccgcgagtgtcccccgccgctgtggagccactgctacctcttgcagctggccaactacattgcctaccactcggacgtgatcgaggacgtaagcggcgaggggctgcttgagtgccactgccgctgcaacctgtgctccccgcaccgctccctggtctgcaacccccagctcctgagcgagacccaggtcatcggtaccttcgagctgcaaggtccggagaagtccaccgctccgctgaaacttacgccggggttgtggacttccgcgtacctgcgcaaatttgtaccccaggactaccacgcccacgaaataaagttctttgaggaccaattgcgcccgcagcacgcggatcttacggcctgcgtcatcacccagggcacgatcctcgcccaattgcacgccatccaaaaatcccgccaagagtttcttctgaaaaagggtaaaggggtctacctggacccccagacgggcgaagtgcttaacccgggtctcccccagcatgccaagaaagaagcaggagccactagtggaggagatggaagaagaatgggacagccaggcagaggaggacgaatgggaggaggaagaattggaagaggtggaacaggagcaggcaacagagcagcccgtcgccgcaccatccgcgccggcagcccctccggtcaagcctcctcgtag

SEQ ID NO: 15409 - DNA, 69 bp, unidentified
  source 1..69: mol_type = other DNA
  misc_feature 1..69: note = Synthetic
atgaacagaaggaaaccaacgctgggctggagcatggctacctgggaggacaggaggatgtgctgctaa

SEQ ID NO: 15410 - DNA, 243 bp, unidentified
  misc_feature 1..243: note = Synthetic
  source 1..243: mol_type = other DNA
atctctaaatacctcataaaacgaaaaaaaagctattatcaaatactgtacggaatggattcattctcttctctttttatgaaactctgttgtatatctactgataaaactggaagcaaaaaatctgataaaaagaataagaataagatcaaggattatatggaacacgattattataaaataacaatagttcctggttcctcttccacgtctactagctcgtggtattatacacatgcctag

SEQ ID NO: 15411 - DNA, 420 bp, unidentified
  source 1..420: mol_type = other DNA
  misc_feature 1..420: note = Synthetic
atcgctatggtctactccctctcgcgatgcgctctctgttcgctgaaggggtcctctggaggtgatttctctgttctactccgtgtggcttcctccctctggggtactctcaacccttcgggccggagtgtcctccaaacttggccgccgggcccctcggatcgggaggcccgcctccttctcttccaccttccctctttccccttcctagagtttcactggcgttatggggaaattcatccgcttcttgctttctcttttttccttcttgggagttgtatctccgacgttccaatgctctttaccgactcacccctctcgggcgctgatctatcctccccgcgaatccttgttcggaacttggctcatctcgaacttgggcgacagggccagcagtctcctctttacagaaaagagtaa

SEQ ID NO: 15412 - DNA, 597 bp, unidentified
  source 1..597: mol_type = other DNA
  misc_feature 1..597: note = Synthetic
aggtggaagccatctctggatcccgtggcgtctcctaaagaggggtatatgcccaagacccgaaagcaacgcagtcgccgacccagaaaccaaagaccatcaactccatggcccatttcccaggtttcggacagagccttctctacgggtaccctgtctacgttttcggcgactgtgtacaggccgattggtgccccatttctggggggctttgttccgctcggctacaccgccatgccttgctggccacgtgccccgaacatcagattacctgggaccccatcgatggacgcgttgtcagctcagctctacaataccttatccctcggctcccctccttccccacccaaagaactacccgcaccctcaaggttctcacccccccaactactgctacgacccccaaggttcctccatccttcttccacgccgttaaaaaacacacccccttccgaaacaattgcctcgagctcaccctgggagagcagctgccagccatgtccttccccgaccctgggctccggccccaaaacgtctacaccatatggggctgctccgtcgtgtgtctctacctctatcagctctccccccccatga

SEQ ID NO: 15413 - DNA, 135 bp, unidentified; identical to SEQ ID NO: 8453
  source 1..135: mol_type = other DNA
  misc_feature 1..135: note = Synthetic

SEQ ID NO: 15414 - DNA, 327 bp, unidentified
  misc_feature 1..327: note = Synthetic
  source 1..327: mol_type = other DNA
ctggctatccggagaaacagcacacgacttggcgttctgtgtgtcgcgatgtctctgcgcgcagtctggcatctggggcttttgggaagcctcgtgggggctgttcttgccgccacccatcggggacctgcggccaacacaacggaccccttaacgcacgccccagtgtcccctcaccccagccccctggggggctttgccgtccccctcgtagtcggtgggctgtgcgccgtagtcctgggggcggcatgtctgcttgagctcctgcgtcgtacgtgccgcgggtgggggcgttaccatccctacatggacccagttgtcgtataa

SEQ ID NO: 15415 - DNA, 240 bp, unidentified
  misc_feature 1..240: note = Synthetic
  source 1..240: mol_type = other DNA
atgctgtttccctgcagacaatgcgagagaatgaatcagaattcaaatatctgcttcactcacggacagaaagactgtttagagtgctttcccgtgtcagaatctcaacccgtttctgtcgtcaaaaaggcgtatcagaaactgtgctacattcatcatatcatgggaaaggtgccagacgcttgcactgcctgcgatctggtcaatgtggatttggatgactgcatctttgaacaataa

SEQ ID NO: 15416 - DNA, 15 bp, unidentified
  misc_feature 1..15: note = Synthetic
  source 1..15: mol_type = other DNA
atgggcggagcgtag

SEQ ID NO: 15417 - DNA, 774 bp, unidentified
  misc_feature 1..774: note = Synthetic
  source 1..774: mol_type = other DNA
atgggtgcgagtggatccaagaagctttccaagcattcgcgaggactacgagagagactcttgcgggcgcgtggggatggttatgggaagcagcgcgacgcatcgggaggggaatactcgcagttccaagaagaatcaggcagggagcagaactcgccctcctgtgagggacagcagtatcagcagggagagtacatgaacagcccatggagaaacccagcaacagaaagacagaaagatttgtataggcagcaaaatatggatgatgtagattctgatgatgatgacctaataggagttcctgttacaccaagagtaccacggagagaaatgacctataaattggcaatagatatgtcacattttataaaagaaaaagggggactgcaagggatgttttacagtaggaggagacatagaatcctagacatatacctagaaaaagaggaagggataataccagattggcagaattatactcatgggccaggagtaaggtacccaatgtacttcgggtggctgtggaagctagtatcagtagaactctcacaagaggcagaggaagatgaggccaactgcttagtacacccagcacaaacaagcagacatgatgatgagcatggggagacattagtgtggcagtttgactccatgctggcctataactacaaggccttcactctgtacccagaagagtttgggcacaagtcaggattgccagagaaagaatggaaggcaaaactgaaagcaagagggataccatatagtgaataa

SEQ ID NO: 15418 - DNA, 165 bp, unidentified
  misc_feature 1..165: note = Synthetic
  source 1..165: mol_type = other DNA
attcgcgaggactacgagagagactcttgcgggcgcgtggggatggttatgggaagcagcgcgacgcatcgggaggggaatactcgcagttccaagaagaatcaggcagggagcagaactcgccctcctgtgagggacagcagtatcagcagggagagtacatga

SEQ ID NO: 15419 - DNA, 111 bp, unidentified
  source 1..111: mol_type = other DNA
  misc_feature 1..111: note = Synthetic
ctgtctacttcaaccccttctccggatctcctgggcattacccggacgagttcataccgaacttcgacgcgattagcgagtcagtggacggctacgattgatgtctggtga

SEQ ID NO: 15420 - DNA, 36 bp, unidentified; identical to SEQ ID NO: 8464
  misc_feature 1..36: note = Synthetic
  source 1..36: mol_type = other DNA

SEQ ID NO: 15421 - DNA, 39 bp, unidentified; identical to SEQ ID NO: 8467
  source 1..39: mol_type = other DNA
  misc_feature 1..39: note = Synthetic

SEQ ID NO: 15422 - DNA, 7110 bp, unidentified
  misc_feature 1..7110: note = Synthetic
  source 1..7110: mol_type = other DNA
atggagggctctaacggattttcgagttcgttggctggcctttcctcatcacgctcttcacttcgcctcctcactcatcttctttccctcccccccccgaatcgcgacgcccgccgccactctggctggtaccgctccccccccaccctccccgtcaatgtctacctcaatgaacaatttgacaatctttgcctggcggctttgcgctacccaggctgcaaattatacccctctgtttacactctatttccagatgtctcacccttcaagatcccccaatccatccccgcctttgcccaccttgtccagcgacaggggttgcgacggcaaggcaaccccaccaccaacatctatggcaatggcaacgaagtcacgaccgacgtcggtgccaatgggatgtctcttcccattgccgtaggtgatatgcctaccgcctcttcctctgaagcccctcttggttccaacaaaggtggctcttccacctctccaaaatccacatccaacggcaacgttgttcgcggatcccgctactccaagtggtgggagcccgcggccgcacgcgccttggatcgtgctcttgaccatgctgttgacgcgactgacgcagttgctggcgccgcctccaagggcatcaaggctggagccaccaagctctccaacaagcttgctggctctcaaaccacagcccttcttgccctccccggcaacattgccggcggtgctccttctgcgacggtcaacgccaacaacacttctatctcctctcaagctcttttaccctccgtcaacccttacccttctactcctgctgtctcactccccaaccccgacgcccccactcaagtcggccctgctgctgaccgacagtggctcgtcgacaccatcccttggtctgagacaaccccaccccttactgtcttctccggacccaaggcccttacccctggtacctaccctcccactatagaacccaacactggtgtctaccctctaccagcggcactttgtgtttcccatcctgaatctgtcttcaccactgcctacaacgctcatgcctacttcaattgtggctttgacgtcacagtcgtcgtgaacgcctcccagttccacggcggctcgctgattgtcttggccatggctgaaggtctaggcgacatcaccccagctgactcttccacttggttcaatttcccccacgcaatcatcaatctggctaattctaattctgctaccctcaaacttccttacattggagtcactccaaacacctccactgaaggacttcacaactattggaccattctctttgcccctctgactcctcttgctgtcccgaccggctcccccacctctgtcaaagtctccctctttgtctctcccattgactcagctttctatggcctcagattccccatccccttcccaacgccccagcactggaagacacgtgctgtccctggtgccggctcctacggctcggtcgtggctggccaggaaatccccctggttggctatgcccccgctgctcccccccgcgattacctccccgggcgcgtgcgcaattggctcgagtacgctgcccgccactcttgggagaggaacctaccctggaccgctgccgacgaagttggcgaccagctagtttcctatcccatccaaccggagactctcgcaaacacccaaaccaacacagcttttgtcctgtccctcttctcccaatggcgtggctctctacagatctctctcatcttcactggtcctgctcagtgctacggccgccttcttcttgcttacacccctccctccgccaatcctcccaccaccatcgaggaagccaacaacggcacctacgatgtctgggatgtgaatggcgactccacctacactttcaccatacccttctgttcacaggcctactggaagactgtcgacatcggcacgtcgtctggtttggtctcaaacaatgggtacttcactatctttgtcatgaaccctcttgtcactcctggcccctcccccccttctgccactgttgctgccttcctccacgtcgcggatgattttgacgtccgcctcccacagtgtcctgcccttggcttccagtcgggagctgatggcgcagaagtccaacctgcccccaccagtgacctctctgatggtaaccccaccactgaccccgctcctcgtgacaactttgactaccctcaccaccctgttgatccttccactgacctagctttctacttctcccagtaccgctggttcggcctcaatgaagatctcactccattgaacgtcaccggtggtctgttctatcacgtctccctcaaccccgtcaacttccagcaaaactctctcctcagtgttcttggtgctttcacttacgtgtatgctaacctttccctcaacatcaacgtctctgctcctcttcaagcttgcaccttctacatcttttatgcccctcccggtgcatctgtcccttctacgcagacccttgcagaactctctttcttcactcatactgccacccctctcaacttagctgctccaactaacatcactgtctctatcccttatgcctctccccagtctgttctctgcacgtcttttggtggcttcggcctccagaacggcggagacccaggcaacctccactccaacacatggggaaccctcattctctatgttgacctcccccaaagcgatagtgtctcagtctctgcttacatctctttccgcgacttcgaagcctacgtccctcggcaaacccctggtgtcggtcccatccccacgagcacctccatcgttcgtgtcgcccggcccactcccaaaccccgcacggtccgccgtcaaggtggtactcttgcagacctcatccttacccccgagagtcgttgcttcattgttgcacatactactgccccctactactccatccttctwgtcaaccccgatgaggagtatgccatcagcatgttcacacatggtgacgagtcaatccttcgttactcgtcacgtggtggcactcgcctcgcccccaccgccccagccttctttctctgtgctgctgcgtctgttgacacaatactcccttaccccatctctcaatcacacctctggctctctgacttgactggcatccctctccgcgcagtcccccccctcaccctcttcctctccgcgggagccgccctgtgtgccggcgcacaaacactgatagccgtcgcacagggtggttccgccccggacaccccccccacccccaaccgcgcccttttccgccgccagggccttggtgacctcccggatgcggccaaaggcctttccgccgcactcgagaacgttgccaaggttgctggtgatgctgacattgccacctcctcccaagccattgcttcttccatcaactctctttccaactccattgatggtgctactaccttcatgcaaaacttcttctctggccttgccccgaagaaccccacctctcctctccaacacctctttgccaagctcatcaaatgggtgaccaaaatcatcggttcactcatcatcatctgcaacaaccccaccccctcagcactcattggtgtttccctcatgctctgcggtgacctcgccgaggacatcacggagttcttctccaatcttgggaatcctcttgctgctgtcttctatcgctgtgctagagctcttggcctctcccccaccccgcaatctgctgcccaggccgccggtggacgtcagggtgttcgtgattacaacgacatcatgagcgctctacgaaacaccgactggttcttcgagaagattatgtcccacatcaagaatcttctcgagtggcttggggtcctcgtcaaagatgaccccaggaccaaactcaactcgcagcatgagaaaattctggaactctacactgactctgttactgcttcttcaactcccccctctgagctttctgcggacgccattcggtccaacctggacctggccaagcaacttctcactctctcgcatgctgccaactctgtcacccacatccagttgtgcacacgcgctatcaccaactactctacagctctctctgccatctcccttgtcggtacacctggcacgcggccagagccactggtcgtgtacctgtacggaccccctgggactggcaaatccctcctcgcttctctcctcgcttctactcttgctcaggccctctctggtgaccccaacaattactactcaccttcttcccctgactgcaaattctacgatggttactctggccagcctgtccactacatcgacgacatcgggcaagaccccgatggcgccgattgggctgactttgtgaacatcgtttcctcagcccccttcatcgtccccatggctgacgttaacgacaagggacggttctacacctcccgcgttgtgatcgtcacctcgaacttccctggccccaacccccgctctgctcgctgcgtggctgcgctggaacgccgcctgcacattcgcctgaatgtgacggcgcgtgacggtgctgccttctcagcggcagctgctctcaagccctctgaacctctcgctgctactcgctactgcaagttctccaaccccctcacccagttttccatgttcaatctggctgttgattacaaatcaattgtcctccccaacaccccactctcctgcttcgatgaactgattgactttatcttgggctctcttcgcgatcgggcctcggtgaactcccttctctctggcatggtgcgcaccgacgtagcacgccagggcgggaacgctgacgcccccgctccctctgcagctcctctcccctctgtcctcccctctgttccttcccaggaccctttcgtccgtgcggtgaacgagaaccgcccggtctctttcctctccaagatctggtcgtggcgtgctcctatcttcgccgcctcctctttcctttccctcattgctgcaaccctcaccattgtccgctgtctccgtgacctgcggtccacccagggtgcgtacagtgggactcctgttccgaaaccacggaaaaaggatctccctaaacaacctgtgtactctgggccagtccgccgtcagggtttcgaccctgccgtcatgaagatcatgggcaatgttgactcttttgtgactctttcgggttctaaacccatctggactatgtcttgcctctggattggcggtcgcaatctgattgctccttcccacgcattcgtctccgatgattatgagatcacccacatccgcgttggatcgcgcacgcttgacgtgtcgcgtgttacgcgggtggatgacggtgagttatctctgatctcggtgccggatgggccggagcataagagcctgatccgctacatccgctccgcctctcctaaatctggtatcctagcttccaaattttctgacacccctgtctttgtctctttctggaacggcaagccccactccacccccctccctggggtcgtagacgagaaagactcgttcacgtaccgctgctcttccttccaaggcttgtgcggttcgccgatgattgccactgatcctggcggcctgggtattctcggtatccatgtcgccggggtggctggctacaacggcttctccgcgcgccttacccctgaacgtgtccaagctttcctctctaacctggccacacctcagtctgttcttcatttccacccacccatgggcccgcctgcgcacgtctctcgtcgcagtcggctccatccctcccctgcctttggcgccttccccatcaccaaagaaccagcagccctttctaggaaggaccctcgcctccccgagggcaccgacctggatgctatcaccctcgccaagcacgacaagggcgacatcgcgacgccctggccttgcatggaagaggcggctgactggtacttctcccagctccctgacagcctcccagtcctctctcaggaagatgccattcgtggtctcgaccacatggatgccatcgacctctctcagtctcctggctatccttggacaacacagggccggtcccgccggtctctgtttgacgaggatggcaaccctgtccctgagcttcaaaaagccatcgattccgtctgggacggtggctcctacatctatcaatctttcctcaaggatgagttgcgccctacggcgaaagccagagctggaaaaacccggattgtggaggcggccccgatacaagcaattgtggtcgggcgtcgtcttcttggttctctcatcaaccacctccagggtaaccctctccagtatggcagcgccgttggatgcaaccctgacatccactggactcaaatcttccactctctcactcccttctctaatgtctggtctattgattactcttgctttgacgccaccatcccctctgtcctcctctctgctattgcctctcgcattgcttctcgctctgaccaacctggccgtgttctggactacctctcttacactactacttcttaccatgtctatgactccctgtggtataccatggtcggtggtaacccctccgggtgtgttgggacttccatcctcaacacgattgcaaacaacatcgcgatcatctccgcgatgatgtattgcaacaaatttgacccgcgggatcctccggtcttgtactgctacggggatgacttgatatggggctccaatcaagactttcaccctcgtgaactccaggctttctatcagaaattcactaactttgttgtcacccccgctgacaaggcttctgactttcctgattcttcctccatctatgacattacttttcttaaacgctactttgtccctgatgatatccacccccacctcatccatcctgtgatggatgaggcaaccctcaccaactcaatcatgtggttgcgtggcggggagtttgaggaggtgttgcggtcactcgagactctggcctttcactccggaccgaataactattcgacctggtgtgagaagatcaaggctaagattcgagagaacggctgcgacgccaccttcactccctactccgtcctccaacgtggttgggtttccacctgcatgactggaccctaccccctcaccgggtag

SEQ ID NO: 15423 - DNA, 81 bp, unidentified; identical to SEQ ID NO: 8468
  misc_feature 1..81: note = Synthetic
  source 1..81: mol_type = other DNA

SEQ ID NO: 15424 - DNA, 450 bp, unidentified
  source 1..450: mol_type = other DNA
  misc_feature 1..450: note = Synthetic
atggcgtgtcttatcgaatgggtcgactccatcttcaaccgacgccaccgtaatttcgggccggaagacatgtacaggccctccgaccccaccccgccctccaaatctcgcactccccgcaccccgcaccaacacaccccgcggaaccggtgtcctgaacgtccgcggcgacacaactcttctcccatctgcggtgcttgtgtggactccctgccgaggaacagaaagcggttccagcatcgacacagttgtcccggagattacgagcagtgtcaactctcggaaaccatcagcctggaggcgacgctactcacggttacaacgacttccatctccagcatctccagcatatacagctctagtagctcagactctatctctttggggcagtgcagactgtccatggtgtctgcgacatcgacctccacgaccttctcctcctcggaatga

SEQ ID NO: 15425 - DNA, 693 bp, unidentified
  source 1..693: mol_type = other DNA
  misc_feature 1..693: note = Synthetic
ctgtttggaactttaacattgcttatcatggcagacaacggtactattaccgttgaggagcttaaacaactcctggaacaatggaacctagtaataggtttcctattcctagcctggattatgttactacaatttgcctattctaatcggaacaggtttttgtacataataaagcttgttttcctctggctcttgtggccagtaacacttgcttgttttgtgcttgctgctgtctacagaattaattgggtgactggcgggattgcgattgcaatggcttgtattgtaggcttgatgtggcttagctacttcgttgcttccttcaggctgtttgctcgtacccgctcaatgtggtcattcaacccagaaacaaacattcttctcaatgtgcctctccgggggacaattgtgaccagaccgctcatggaaagtgaacttgtcattggtgctgtgatcattcgtggtcacttgcgaatggccggacactccctagggcgctgtgacattaaggacctgccaaaagagatcactgtggctacatcacgaacgctttcttattacaaattaggagcgtcgcagcgtgtaggcactgattcaggttttgctgcatacaaccgctaccgtattggaaactataaattaaatacagaccacgccggtagcaacgacaatattgctttgctagtacagtaa

SEQ ID NO: 15426 - DNA, 342 bp, unidentified
  misc_feature 1..342: note = Synthetic
  source 1..342: mol_type = other DNA
ttgatcaaacccagcttcagcttgcctgctccagagatgaccggctcaaccatcgcgcccacaacggactatcgcaacaccactgctaccggactaacatctgccctaaatttaccccaagttcatgcctttgtcaatgactgggcgagcttggacatgtggtggttttccatagcgcttatgtttgtttgccttattattatgtggcttatttgttgcctaaagcgcagacgcgccagaccccccatctataggcctatcattgtgctcaacccacacaatgaaaaaattcatagattggacggtctgaaaccatgttctcttcttttacagtatgattaa

SEQ ID NO: 15427 - DNA, 3618 bp, unidentified
  misc_feature 1..3618: note = Synthetic
  source 1..3618: mol_type = other DNA
ctgccggtcgccgatctcccgaaagccatggacaccaagcccaaaacgacgaccaccgtcaaggttcctccggggccgatggggtacgtgtatggccgcgcctgtccggccgaaggcctggagctgctgtcgctactgtcggcgcgcagcggcgacgcggacgtcgccgtcgcgcccctcatcgtcggcctgaccgtggagagcgggtttgaggccaacgtggccgcggtcgtcgggtcccgcacgacgggccttggggggaccgcggtgtccctcaagcttatgccctcgcactacagcccgtccgtttacgtctttcacggcggccgccacctggcccccagcacccaggcccccaacctgacgcggctctgcgagcgggcgcgccgccattttggcttcgcggactacgcgccccggccctgcgacctaaagcacgagacgacgggggacgcgctgtgcgagcggctcggactggacccggaccgggccttgctgtatctggtgatcacggagggcttccgggaggccgtgtgcatcagcaacaccttcctgcatctgggcgggatggacaaggtaaccatcggggacgcggaggttcaccgcatccccgtgtatccgctgcagatgtttatgccggattttagccgggtcatcgccgatccgtttaactgcaaccaccgatcgatcggggagaatttcaactacccccttccgtttttcaaccgccccctcgcccgcctgctgttcgaggcggtcgtcgggcccgccgccgtggccctgcgtgcccggaacgtggacgccgtggcccgcgcggccgcccacctggcgttcgacgaaaaccacgagggcgcggccctccccgccgacattacgttcacggccttcgaggccagccagggtaagccccagcggggcgcgcgcgacgccgggaacaagggcccggcgggcgggtttgagcagcgcctggcctcggtgatggcgggcgacgccgccctggccctggagtccatcgtgtcgatggcggtctttgacgagccgccccccgacatcaccacgtggcccctgcttgagggccaggaaacgcccgcggcccgcgccggcgccgtcggggcgtacctggcgcgcgccgcgggcctcgtgggcgccatggtgttcagcaccaattcggccctccacctgaccgaggtggacgacgccgggccggcggaccccaaggaccacagcaagccctccttttaccgcttctttctcgtgcccggcacgcacgtggcggccaacccgcagctggaccgcgagggccacgtggtgcccgggtacgaggggcgccccacggcgcccctcgtcggcggaacccaggagttcgccggcgagcacctggccatgctgtgcgggttctctccggccctgctggccaagatgctgttttacctggagcgctgcgacggcggagtcatcgtcgggcgccaggagatggacgtgtttcgctacgtcgcggactcgggccagaccgacgtgccctgcaacctgtgtaccttcgagacccgccacgcctgcgcgcacacgacgctgatgcggctgcgggcccgccaccccaagttcgcgagcgccgcccggggggccattggggtcttcggaacgatgaacagcgcgtacagcgactgcgacgtgctggggaactacgccgccttctcggccctgaagcgcgcggacgggtccgagaacacccggaccatcatgcaggagacgtaccgcgcggccaccgagcgcgtcatggccgagctcgaggccctgcagtacgtggaccaggcggtgcccacggccctggggaggctggagacgattatcggcaaccgcgaggccctgcacacggtggtgaacaacatcaagcagctggtggatcgcgaggtggaacagctgatgcgcaacctgatcgaggggcgcaactttaagttccgcgacggtctggccgaggccaaccacgccatgtcgctgtcgctggacccgtacacctgcgggccgtgccccctgctgcagctcctcgcgcggcggtccaacctcgccgtgtaccaggacctggccctgagccagtgccacggggtgttcgccgggcagtcggtcgaggggcgcaactttcgcaatcaattccaaccggtgctgcggcggcgcgtcatggacctgttcaacaacgggttcctgtcggcgaagacgctgacggtcgcgctctcggagggggcggctatctgcgcccccagcctaacggccggccagacggcccccgccgagagcagcttcgagggcgacgttgcccgcgtgacccttgggtttcccaaggaactgcgcgtcaagagccgcgtgttgttcgcgggcgcgagcgccaacgcgtccgaggccgccaaggcgcgggtcgccagcctccagagcgcctaccagaagcccgacaagcgcgtggacatcctcctcggaccgctgggcttcctgctgaagcagttccacgcggtcatctttcccaacggcaagcccccggggtcgaaccagccgaacccgcagtggttctggaccgccctccagcgcaaccagctccccgcccggctcttgtcgcgcgaggacatagagaccatcgcgttcattaagaggttctccctggactacggcgcgattaactttatcaacctggcccccaataacgtgagcgaactggccatgtactacatggccaaccagatcttgaggtactgcgaccactcgacgtacttcataaacaccctcacggccgtcatcgccgggtcccgccgtccccccagcgtgcaggcggcggccgcctgggccccgcagggcggcgcgggcctggaggccggggcccgcgcgctgatggactccctcgacgcgcaccccggcgcctggacgtccatgttcgcgagctgcaacctgctgcggcccgtgatggccgcgcgcccgatggtcgtgctgggcctcagcatcagcaaatactacggcatggccggcaacgaccgcgtgtttcaggccgggaactgggccagcctgctgggcggcaaaaacgcgtgcccgctgctgatctttgaccgcacccgcaagtttgtcctggcctgccccagggccgggtttgtgtgcgcggcgtcgagtctcgggggcggggcccacgagcattcgctgtgcgagcagctccggggcatcattgcggagggcggggcggcggtcgccagcagcgtgtttgtggcgaccgtcaagagcctgggcccccgcacccagcagctgcagatcgaggactggctggcgctgctggaggacgagtacctgagcgaggaaatgatggagtttaccacccgcgccctggagcgcgggcacggcgagtggtcgaccgacgcggccctggaggtggcccacgaggcggaggccctggtcagccagctcggcgccgccggggaggtgtttaactttggggatttcggcgacgaggatgaccacgcggcgtcgttcggcggtttggcggcggcggcgggggcggccggcgtcgcccgaaagcgggcgtttcacggcgacgatccgtttggggagggaccaccggagaaaaaggacctgacgttggatatgctctag

SEQ ID NO: 15428 - DNA, 60 bp, unidentified; identical to SEQ ID NO: 8483
  source 1..60: mol_type = other DNA
  misc_feature 1..60: note = Synthetic

SEQ ID NO: 15429 - DNA, 1770 bp, unidentified
  source 1..1770: mol_type = other DNA
  misc_feature 1..1770: note = Synthetic
gtgacctatcaagcaagaacgaaattaaacctggggcaaataaccatggagctgctgatccacaggttaagtgcaatcttcctaactcttgctattaatgcattgtacctcacctcaagtcagaacataactgaggagttttaccaatcgacatgtagtgcagttagcagaggttattttagtgctttaagaacaggttggtataccagtgtcataacaatagaattaagtaatataaaagaaaccaaatgcaatggaactgacactaaagtaaaacttataaaacaagaattagataagtataagaatgcagtgacagaattacagctacttatgcaaaacacaccagctgccaacaaccgggccagaagagaagcaccacagtatatgaactatacaatcaataccactaaaaacctaaatgtatcaataagcaagaagaggaaacgaagatttctgggcttcttgttaggtgtaggatctgcaatagcaagtggtatagctgtatccaaagttctacaccttgaaggagaagtgaacaagatcaaaaatgctttgttatctacaaacaaagctgtagtcagtctatcaaatggggtcagtgttttaaccagcaaagtgttagatctcaagaattacataaataaccaattattacccatagtaaatcaacagagctgtcgcatctccaacattgaaacagttatagaattccagcagaagaacagcagattgttggaaatcaacagagaattcagtgtcaatgcaggtgtaacaacacctttaagcacttacatgttaacaaacagtgagttactatcattgatcaatgatatgcctataacaaatgatcagaaaaaattaatgtcaagcaatgttcagatagtaaggcaacaaagttattctatcatgtctataataaaggaagaagtccttgcatatgttgtacagctacctatctatggtgtaatagatacaccttgctggaaattacacacatcacctctatgcaccaccaacatcaaagaaggatcaaatatttgtttaacaaggactgatagaggatggtattgtgataatgcaggatcagtatccttctttccacaggctgacacttgtaaagtacagtccaatcgagtattttgtgacactatgaacagtttgacattaccaagtgaagtcagcctttgtaacactgacatattcaattccaagtatgactgcaaaattatgacatcaaaaacagacataagcagctcagtaattacttctcttggagctatagtgtcatgctatggtaaaactaaatgcactgcatccaacaaaaatcgtgggattataaagacattttctaatggttgtgactatgtgtcaaacaaaggagtagatactgtgtcagtgggcaacactttatactatgtaaacaagctggaaggcaagaacctttatgtaaaaggggaacctataataaattactatgaccctctagtgtttccttctgatgagtttgatgcatcaatatctcaagtcaatgaaaaaatcaatcaaagtttagcttttattcgtagatctgatgaattactacataatgtaaatactggcaaatctactacaaatattatgataactacaattattatagtaatcattgtagtattgttatcattaatagctattggtttgctgttgtattgcaaagccaaaaacacaccagttacactaagcaaagaccaactaagtggaatcaataatattgcattcagcaaatag

SEQ ID NO: 15430 - DNA, 210 bp, unidentified
  misc_feature 1..210: note = Synthetic
  source 1..210: mol_type = other DNA
atgcgcgcgtacttgccgagctcctcgaagacgggaaactcggttagctgcagccagagcacgaacagcgaggccgcgagcgtgagcgtgaagaacaccagcgtggaggtgcgcgcagcgcgcaggctgcgcagggcgcgctcgcgcgcgaactccagggtcaggccgttggccgtcagtgtcgtgacgtctgccatttgtatcatataa

SEQ ID NO: 15431 - DNA, 72 bp, unidentified; identical to SEQ ID NO: 8487
  misc_feature 1..72: note = Synthetic
  source 1..72: mol_type = other DNA

SEQ ID NO: 15432 - DNA, 1095 bp, unidentified
  source 1..1095: mol_type = other DNA
  misc_feature 1..1095: note = Synthetic
atggatcgtagcaacagagaacaccatagtcaccgagatcatcgcgaacatcgagattccaaagagcctcccaccatggcttttcacatgaaaacttggaaaacaatcaataagcctctaagagcttttgcaaagcttttgcgagaaaatactacagttacttttactcctcaaccggcaatcataattcaatctgcaaaaaaccatttggttttaaagctgattattcatgcagaatgtttatatataaccgatacagatcatttttcgactaaaacgataaataactttgttccattatttgatagttttatgggcattatatcaaatcctgatgtcactaaactgtatattcaacatgatagcgatctctatacgcggtttttagtcacggcatcagatatttgtgcacaagcatctattccttgtgtcaatggtcaagaaattgtaagagaaagcggaaaatctgcacttcgaatagacttggaccattcaactgtaacggagattttaaaatggcttgctccggtcacaaagaacaaacgcagtaataaaaatgaaatgacgttggcacaaatagttgtgcaagttaacccgccaagtataaaatttctaaccgacttaaacgaaatagaatttgctcatagcgggaaagttgtgtttcacgacgcaaaatgcatgagacttgtactatcttccaaaaatctacagcaagcatttagtacttgtgcagttttaaagtcttcgtgtagtcttagagcaatagctggcaaagaatacaaattatttttaatcgctaaaaatgtttttctgaccgtagaagcttatttaagtcaagagcaggttaaagacgacccaaaatttgaacgtcaagcaaaaacagaggaaaaaggagagaaaaatcacaaggtggaggaaggaaataattttttttgtaaacaggaaacgcaacacaaaattacaagttacatggtgcccactaaaaatggtggcacaggaacaaatttttttaatgagaaagaggacagcgaaagtgacgattctgcacattttgactataccccaaattcgaaaagacaaagatgtggaatgtaa

SEQ ID NO: 15433 - DNA, 27 bp, unidentified
  source 1..27: mol_type = other DNA
  misc_feature 1..27: note = Synthetic
ataatattaaacattcgttcgacctaa

SEQ ID NO: 15434 - DNA, 60 bp, unidentified; identical to SEQ ID NO: 8495
  misc_feature 1..60: note = Synthetic
  source 1..60: mol_type = other DNA

SEQ ID NO: 15435 - DNA, 30 bp, unidentified; identical to SEQ ID NO: 8497
  source 1..30: mol_type = other DNA
  misc_feature 1..30: note = Synthetic

SEQ ID NO: 15436 - DNA, 894 bp, unidentified; identical to SEQ ID NO: 14867
  misc_feature 1..894: note = Synthetic
  source 1..894: mol_type = other DNA

SEQ ID NO: 15437 - DNA, 111 bp, unidentified; identical to SEQ ID NO: 8904
  misc_feature 1..111: note = Synthetic
  source 1..111: mol_type = other DNA

SEQ ID NO: 15438 - DNA, 27 bp, unidentified
  misc_feature 1..27: note = Synthetic
  source 1..27: mol_type = other DNA
ataatattaaacattcgttcgacctaa

SEQ ID NO: 15439 - DNA, 93 bp, unidentified; identical to SEQ ID NO: 8507
  misc_feature 1..93: note = Synthetic
  source 1..93: mol_type = other DNA

SEQ ID NO: 15440 - DNA, 1686 bp, unidentified
  source 1..1686: mol_type = other DNA
  misc_feature 1..1686: note = Synthetic
attagaattagttttagagatcccttcttcgggtgcaactcaagatcaattatgaaggtaactattttgacagcctacattgcagcaagtgttttcacctgttgccactcccagttggccctcagtgagctcaccaagattggcattatccctgggaggtcatatgatctcaaaacctcgactcaagcttcttatcagtacatggttataaaacttattcctaatgtgaatggcttaaacaactgtactaacagtacagtcgaatcatacaagaaaatgctaacaagactcctgaatcccattgacgtagcacttaagaagatgaaaaatgcagtctcggacaaggctccagaaaagctaggcaacgtcaagttctggggggcggtcatcggtggagttgcattaggggtggcgacttcagcgcagattacagcaggcgttgctcttcacaactccattcagaatgcaaatgctattttgacactcaaagattctatcaggcagtctaacaaagcaatacaagaattacaaacagctatgtctaccactgtcgttgtgttaaatgctctccaggaccagataaataatcagttggccccagctataaattctctaggatgccaggtggttgctaatacactaggtctaaaattaaaccagtacttcagtgaaatctcacttgtctttggcccgaatttgcgagaccccacttcagaaacactttcaatccaggcactttccagagcatttaacggtgactttgattctatgctgtctagacttaaatatgatgacagtgatttccttgatttgttggagagtgacagcatcagaggaagaataatagatgtgtctctagaagattacctaattacaattcagattgagtaccctgctctattgacaataaaggatgctattatacagacattcaatttaataagctataatactagaggaactgagtggatatctatatttcctaagcagctgttggttagagggacttacatatctaacattgatatatcacaatgtgttcttgctgcaacttctattatatgcaaatcagacactagtacccctattagttctgctacttgggcttgtgctacagggaatgtaactagctgcgccagaactagggttgtaaatgctcatgtccccaggtttgctctctcaggtggtgttatatttgctaattgtgcacctgttgtatgtaaatgccaagatccgctttatagcataaatcaagaacccaaagtgacaaatgtaatggtcgatgttgatgcctgtaaagagatgtatcttgatggattatacataacacttggtaagtcacagttaccccgtgctatgtatgccgaggatgtgtctttgggaggtccaataagcgtggatctcatagacctgggcaatgagatcaattcaatcaatagtgcaatcaataggtcggaggagcatctggatcatgcaaatgagctacttgatcaggttaatcctaagatagtcaatgtcaagaccttcggggttatgttgggattattgctgctcctgatactatggtgtgttgtgactttggtgtggctcatttgccttacaaaacaagtgagtagagtgtcttttggaggaagcatgggtagtcgggcatcgacagttaattcactctccggattcgtgggttaa

SEQ ID NO: 15441 - DNA, 87 bp, unidentified
  source 1..87: mol_type = other DNA
  misc_feature 1..87: note = Synthetic
gtgagctcaccaagattggcattatccctgggaggtcatatgatctcaaaacctcgactcaagcttcttatcagtacatggttataa

SEQ ID NO: 15442 - DNA, 927 bp, unidentified
  source 1..927: mol_type = other DNA
  misc_feature 1..927: note = Synthetic
acggatcttctgccaaaatatatgttaaaccagtcatgcaatccagcacaatcatcgaagaagcctgagaaaatatcattcattatgtatgataattccttgcatgaatgtcctgaaatgcccggtgattcaattttaattagcgatatttgtccacttaatcatgaacatttttgtggtggtatacacatacctaaacaagagaacacttctccgaaaggtagactcgcacacgccgcagcagataagataatatggccttgtggactaaaatcaatgaaaatcaatgacagaaaaattgaaggctatacattcgtcaaatgtcgttgcggtaatctatatccaacatggatacctggagagagaaacttcttttttatcacatgttgtgccaatgacaccgctgcagttaagttgggaaagactgatggagacaaatgtcaaaactgttcaaaatttaacagatggtacttcccaggtctaggatttaactcagatgtaagtcaatataaaacgcgattcttctgtcctgcatgtactccaattcgcgacttagtatcaaatatgactagatttgggtcaactgtttttaaatcaccaagttatactgatatgctaaaaaattatgagtggaaaaggaatcttacaaacaatagtgaaatcgcgtttcgcgcccttaattcgccttttattcagacttccataactacctacagtaaaattgacgcagacgtgaattcaatgacagttaccgagcttgttgcttcagtgaatagaacatggaatactgaatttaagataattccaattaaccgcacgaaagtgctttttaaagactattacagagggaaatctatcatatttcatgacaacgatcatttacataatcaaatactattgacattaactgactggcatttcctatag

SEQ ID NO: 15443 - DNA, 33 bp, unidentified; identical to SEQ ID NO: 120
  misc_feature 1..33: note = Synthetic
  source 1..33: mol_type = other DNA

SEQ ID NO: 15444 - DNA, 108 bp, unidentified
  source 1..108: mol_type = other DNA
  misc_feature 1..108: note = Synthetic
ctgtctacttcaaccccttctccggctctcctggccagtacccggacgagttcataccaaacttcgacgcaatcagcgagtcagtggatggctatgattgatgtctaa

SEQ ID NO: 15445 - DNA, 888 bp, unidentified
  source 1..888: mol_type = other DNA
  misc_feature 1..888: note = Synthetic
atggccgcgcccacgggcttcgctgcgcaggtgcacgcgctggtgcgcgacgggctctgtgcggacatgcccttctacgagacgttgccggagctgaacctggtcttcggaaagaaccatacgcctagcctgcagtacggcgcgaactacttcctgcagctgtccaaggtgaacgacctcaaccgcatgtccacggacatggtcaacctctacacgcacgacctcacagcgccggaaacggacctggagaaggtctacgaggagcacggcatcgagtccatcaaggcctacggcaagagcatccgcgccgacgctatcgtggcggacctgagcgcgcgcaacaagctcttcaagaaggagcgcaccttcgtcaagtccaacaactacctcaaggagaacaacttctacgttagcgactactccatgatgaccttcgaggtcttccgcccgctcttcgacctgggaagcgagcgcttctgcatcgtcaagctacccacgctctttgggcgcaccgtggccaacgccgtgcgcgtgtactgcagcctcttccggcgcgtgcagctgtgcaagggcgcgagcgacagctggctcaaggacagcgcgctgttagtgtgccgcgacgcgtacacacccaacctagagcgcttcctggcgtacgtgcgcgccagcacgcgctcgcccgcgtggcgggaagccaacaacgcgcccttcacgctgttggacgcgcccgtggaaagggagttcctggaacagttcctgggcttcagcaaccaggtctacatggccatctactacgtgcacacgctgctttacaacagcatgacctccgagtccaagagtatcgagaacgacttccagcgccgcttggtgcggctgctgcgctcgtag

SEQ ID NO: 15446 - DNA, 63 bp, unidentified; identical to SEQ ID NO: 8519
  source 1..63: mol_type = other DNA
  misc_feature 1..63: note = Synthetic

SEQ ID NO: 15447 - DNA, 63 bp, unidentified; identical to SEQ ID NO: 8519
  source 1..63: mol_type = other DNA
  misc_feature 1..63: note = Synthetic

SEQ ID NO: 15448 - DNA, 180 bp, unidentified
  misc_feature 1..180: note = Synthetic
  source 1..180: mol_type = other DNA
atggatgagaacacgtatgctatggagttgcttactgggtacgcccctgtatctccgatcgttatagcgagaactcataccgcacttatatttttgatgggtaagccaacaacatccagacgtgacgtgtatagaacgtgtagagatcacgctacccgtgtacgcgcaactggtaattaa

SEQ ID NO: 15449 - DNA, 39 bp, unidentified; identical to SEQ ID NO: 8522
  misc_feature 1..39: note = Synthetic
  source 1..39: mol_type = other DNA

SEQ ID NO: 15450 - DNA, 180 bp, unidentified
  source 1..180: mol_type = other DNA
  misc_feature 1..180: note = Synthetic
atggatgagaacacgtatgctatggagttgcttactgggtacgcccctgtatctccgatcgttattgcgagaactcataccgcacttatatttttgatgggtaagccaacaacatccagacgtgatgtgtatagaacgtgtagagatcacgctacccgtgtacgtgcaactggtaattaa

SEQ ID NO: 15451 - DNA, 180 bp, unidentified
  misc_feature 1..180: note = Synthetic
  source 1..180: mol_type = other DNA
atggatgagaacacgtatgctatggagttgcttactgggtacgcccctgtatctccgatcgttatagcgagaactcataccgcacttatatttttgatgggtaagccaacaacatccagacgtgatgtgtatagaacatgtagagatcacgctacccgtgtacgtgcaactggtaattaa

SEQ ID NO: 15452 - DNA, 201 bp, unidentified
  source 1..201: mol_type = other DNA
  misc_feature 1..201: note = Synthetic
attgtatatactaactctctaatggatgagaacacgtatgctatggagttgcttactgggtacgcccctgtatctccgatcgttatagcgagaactcataccgcacttatatttttgatgggtaagccaacaacatctagacgtgatgtgtatagaacgtgtagagatcacgctacccgtgtacgtgcaactggtaattaa

SEQ ID NO: 15453 - DNA, 42 bp, unidentified; identical to SEQ ID NO: 8526
  source 1..42: mol_type = other DNA
  misc_feature 1..42: note = Synthetic

SEQ ID NO: 15454 - DNA, 192 bp, unidentified; identical to SEQ ID NO: 14050
  misc_feature 1..192: note = Synthetic
  source 1..192: mol_type = other DNA

SEQ ID NO: 15455 - DNA, 777 bp, unidentified
  misc_feature 1..777: note = Synthetic
  source 1..777: mol_type = other DNA
atggactctgacgctcctggtcctgtgatgtgttttcgtagacagatggaagacatcaatttttcgtccctggctccgcgacacggcacgcggccgttcatgggcacctggagcgacatcggcaccagccaactgaacgggggcgccttcaattggagcagtctctggagcgggcttaagaatttcgggtccacgcttaaaacctatggcagcaaggcgtggaacagcaccacagggcaggcgctgagggataagctgaaagagcagaacttccagcagaaggtggtcgatgggctcgcctcgggcatcaacggggtggtggacctggccaaccaggccgtgcagcggcagatcaacagccgcctggacccggtgccgcccgccggctccgtggagatgccgcaggtggaggaggagctgcctcccctggacaagcggggcgagaagcgaccccgccccgacgcggaggagacgctgctgacgcacacggacgagccgcccccgtacgaggaggcggtgaaactgggtctgcccaccacgcggcccatcgcgcccctggccaccggggtgctgaaacccgaaagtaataagcccgcgaccctggacttgcctcctcccgcttcccgcccctctacagtggctaagcccctgccgccggtggccgtggcccgcgcgcgacccgggggctccgcccgccctcatgcgaactggcagagcactctgaacagcatcgtgggtctgggagtgcagagtgtgaagcgccgccgctgctattaa

SEQ ID NO: 15456 - DNA, 111 bp, unidentified
  misc_feature 1..111: note = Synthetic
  source 1..111: mol_type = other DNA
ttgaggatacatggggatctgatggtaatccaattacaaaaactacatccgattatcaagattctgatgtatcacaagaagttagaaagtatttttgtgttaaaacaatga

SEQ ID NO: 15457 - DNA, 60 bp, unidentified; identical to SEQ ID NO: 8534
  misc_feature 1..60: note = Synthetic
  source 1..60: mol_type = other DNA

SEQ ID NO: 15458 - DNA, 837 bp, unidentified
  misc_feature 1..837: note = Synthetic
  source 1..837: mol_type = other DNA
atgtccctggaaagggccctggcgagactgactggagtgccaatgagtactcatgccccgaagactcgcgagtcagaagaggcctgtcccgtatacccccaccctgtggtgccccgccttgtcctggaagtgcataggaaaaacaacgcactggttggaagcaatacccccaaaatgtccgtgatgggccacttagatatagcgtgtctcagggagcacgtgaaatctcgcctgtcctcgcccaactttgtgggatttacggtggtgtgcctggtggagcacgaagacatggtgacccacatagacctacaccctcacgtgttccaagagcgagtgtgcctccttagacctacatctcccggcataaccgagctctgctgcctgttatcgatgctcgagaactgtcgagacatgtcaccaacgtttttgagatctattatttgtcgcgccagaaagacacatgagaggacgccggggatggacgcggccttcgtcatgcacggtatagagacgttgactgccacggccgcctttgtttacgagctgtccgtggacgatcatttcagggccaccccactcgttatgtttaagcttcataaggcgataggcgacgcttcaacccccatggggggactaatgaaacccatttatctagagtcttttaaactggagtctagtggagagaatgaagatgacaaacaaacctgcgcggacccagtaaacattttttattgtgataccatctttaccaagcacctggagaacaatgaagttttaaaatatctgaaaatgtgcacccttttcaaaccccccattgtttcccttttttcaaaataa

SEQ ID NO: 15459 - DNA, 837 bp, unidentified
  source 1..837: mol_type = other DNA
  misc_feature 1..837: note = Synthetic
atgtccctggaaagggccctggcgagactgactggagtgccaatgagtactcatgccccgaagactcgcgagtcagaagaggcctgtcccgtatacccccaccctgtggtgccccgccttgtcctggaagtgcataggaaaaacaacgcactggttggaagcaatacccccaaaatgtccgtgatgggccacttagatatagcgtgtctcagggagcacgtgaaatctcgcctgtcctcgcccaactttgtgggatttacggtggtgtgcctggtggagcacgaagacatggtgacccacatagacctacaccctcacgtgttccaagagcgagtgtgcctccttagacctacatctcccggcataaccgagctctgctgcctgttatcgatgctcgagaactgtcgagacatgtcaccaacgtttttgagatctattattagtcgcgccagaaagacacatgagaggacgccggggatggacgcggccttcgtcatgcacggtatagagacgttgactgccacggccgcctttgtttacgagctgtccgtggacgatcatttcagggccaccccactcgttatgtttaagcttcataaggcgataggcgacgcttcaacccccatggggggactaatgaaacccatttatctagagtcttttaaactggagtctagtggagagaatgaagatgacaaacaaacctgcgcggacccagtaaacattttttattgtgataccatctttaccaagcacctggagaacaatgaagttttaaaatatctgaaaatgtgcacccttttcaaaccccccattgtttcccttttttcaaaataa

SEQ ID NO: 15460 - DNA, 3159 bp, unidentified
  misc_feature 1..3159: note = Synthetic
  source 1..3159: mol_type = other DNA
ttgatcatcgataacacgttatcaaccattgagtttgtatacatggtagttaaagcggttctcacgcaagcagacacattgaaagcgttcgaacaaaggaaaaacagacccacaaacagaattttagggttgtccacatcagtctcaaaacgatacatcaacattcccaaattttcgagctccggagccaataattcgcaaggcgtgaaaacccttgccgctatacgtaaattctccctgccggacaaaaactgtttcagaaatttcctttctttttctacaacattatttaaggttcccgcctcgatagatatatattttctcttcttcacagcttccacagtatccacaatggcagctcgtgcactcgatttagagttcattcttagttcactcaaaaacagcacgtccccagaatcattactagccgctacggcaaaaatcgagattttatccctggcagccgatagcgtaacacacaacagagtaatagcttttattaatcgactgcccccgaaaaaatatcactttgaccttatcagggaatatacagttttctactttttaaactctacgaccttaacatcagaaaataaattgctctccgcagaacttttacacgaagaactcagtcaaattcgctcttcgagttcgccgggcacagaacttgaaaacttaaataatgcagaggtcctttacgtgttcgatcgaatactcaattccattaaaatgctaaaaaatgagttatcgtctccaatcggcaaacttcgagtacaacccgccgccaacgacccaggtaccgataaaacgataaaatactccaagattcaatccatcatacaaaaggtacacagctttacacgagaaaattcacttcttgccaactgccgcgccgtcgtagaactgatagacgatctatatcggaaactttactcatggtttctacatattctcactttcgaggacattcagtttccaggcgacacatttctagacaggctgttgaaaatggactactgttttacatattacccttcttcaaatcgccatctaatagatcttttcgaaaagacgttggacaatcaaacatccacagacatcgataaattttttgacacttcaggaaacagtccagaactactttatcaaaaaacgtttagcttgaaaatattttcaaaaaatctcacagcccaggacaatggattatatatctatccactacttaaaaccgacctgtccatcctcgacttcctcggaaccgaaaatattctcttccatcgaggtctcatctatcacatacttcatcaaaaaacaatccctcaagaacgggagaatgatctcaataaaatcaatcaatttttcgctactgtcatccagcaggttatcgaaacgagaagctcatgcttacccgcgtcgttatcccgactcttagatacgatttttcacttcaacagaatcggtttaaacatagaaacgtgcagaatctacgtcgagatcctctcaaaccacatggcgacaccagacacccaacccataatcaatacattcaccatcaacttaatccatattgttttcaccgcgcacgtgtttttcatctgcatggaaaatttcagcccgacattcttattctataataggaaaaaactcatattagaacaacagagagccattttgatcatcgaacgaaatgaatattccacactctggaaacaaatatctgatcacatcgactgtctcttcaacatctctctctccgaatccttttttaaagaatataccaaaggaggaaacgaagaacataaacagtttctatacaaaaacctattcgaaaaatggggtgacgtctttttccctttcacgtactcggtaaccacctcaaaaaactccacggcacaccatattacaacccttgagctaagggccatctgcaaagaggtctatcagagcgattccccggaggcatacgaatcgttacttccctacagcactcatccagcttttaaaacattattcattaaaatctacgttatacctatggtcacatacattaccaatcttacctttgataaattacaatctgattacagactcataactctgatccacgcctgtaaactcctactcccctcgcaacatctactactacactacatggtgtggctatacgctttttccataaacgtagaccacatagatctaggcactttcaccgtaataaagtccgtaatctttaaaatcgctgaccacataaacgtgatgacgcatacgatctactcccctgagacaaaccttctcgtaagcattctactaaacgcgtataccgactaccttcaaaaatacgtaaacccctggatcaaacagaccataacggcaaacttctccctgttacagacgtacataaccttcacgaaacaatgcgccagcatcttagcgaccaaatgcaacataaacttagacaatctatttatctccatgactatcggaacagacaaaattgtaaccacttcgttttgctccttcatcgctacatgcagaaatttagtacgtcaacacgaagaattcaaaaaatcactaaaaacgatcgaaacttccaaaaccacactcacgaatatgctactaaacataatcacaagcgtctcctcctccaaggagctgctgaccaacgaagcactacaaaaattcatcgacactgtccaacgcatctcccaacacgtaaacgaaacataccaattaatttccgtgaacctcgaaaaatgtaaaatctcaaacgacatcctaatcgaatccctaaagaagaccatctccatagttgatgtactcagctccgatgcaatcctaaacacgtcgttaacttctagatgtctggaggccgccacgctcgcggtttcaaacaattctttcacaatactcgaaattaaaaaggacgcagttgccgttttcaagccttttataacacaactatttgaaagcatgaaacccaccacgagtctatataagaaattgatggctacccaaaaactgaccaccgaccgcattccatttctcgatatcttcgacgataggtacaacctagtcagacacgtcgaacgacaattaaactggtacgccgcatatgccgaagcagcgcagcaagatcttattgctcctcttacgttttaa

SEQ ID NO: 15461 - DNA, 3174 bp, unidentified
  source 1..3174: mol_type = other DNA
  misc_feature 1..3174: note = Synthetic
aggtacctacacgtattgatcatcgataacacgttatcaaccattgagtttgtatacatggcagttaaagcggttctcacacaagtagacacattgaatgcgttagaacaaaggaaaaacagacccacaaacagaattttagggttgtccacatcagtctcaaaacgatacatcaacattcccaaattttccagctccggtgccagtaattcacaaggagtgaaaacccttgccgctatacgtaaattctgcctgccggacaaaaactgtttcagaaatttcctttctttttctacaacattatttaaggttccctcatcgatagatatatattttctcttcttcacagcttccacagtatccacaatggcagctcgtgcactcgatttagagttcatccttagttcactcaaaaacagcacgtctccagaatcattactagccgctacggcaaaaatcgaacttttatccctggcagccgatagcgtaacacacaacagagtaatagcttttattaatcgactaaccccgaaaaaatatcactttgacctcatcagacagtatgcggtattctactttttaaactctacgaccttaacatcagaaaataaattgctctccgcagaacttttatacgaagaactcagccaaattccctcttcgagttcgtcgggcacagaacttgaaaacttaaataatgcagaggtcctttacgtgttcgatcgaatactcaattccattaaaatgctaaaaaatgagttatcgtccccaatcggcaagcttcgagcacaacccgccgccaatgacccaggtacagataaaacgataaaatactccaagattcagtcgatcatacaaaagataaacagctttacacacgaaaattcacttcttgccaactgccgcgccgtcgtagagctgatagacgatctatatcggaaactttactcatggtttctgcacgttctcactttcgaagacattcagtttccaggcgacacatttctagacaggctgttgaaaatggactactgttttacatattacccttcttcaaatcgccatctaatagatctgttcgaaaagacgttggacaatcaaacgttcacgaatctcgataaattttttgacacctcaggaaacagcccagaactactttatcaaaaaacgtttagcttgaaaatattttcaaaaaatctcacagcccaggacaatggattatatatctatccactacttaaaaccgacctgtccatcctcgacttcctcggaaccgaaaatattctcttccatcgaggcctcatctatcacatacttcatcaaaaaacaatccctcaagaacgggagaatgatctcaataaaatcaatcaatttttcgctactgtcatccagcaggttatcgaaacgaaaagctcatgcttacccgcatcgttatcccaactgctagatacaatttttcacttcaacagaatcggtttaaacatggaaacgtgcagaacctacatcgagatcctctcaaaccacatggcaacgccagacacccaacccataatcaatacattcaccattaacttaacccatattgttttcaccgcgcacgtgttttttatctgtatggaaaattttagcccaacattcatattctataataggaaaaaactcatactagaacaacagagagccattttgatcatcgaacgaaatgattattccacactctggaagcaaatatctgatcacatcgaatgtctctttaacgtctctctctccgaatccttttttaaagaatataccaaaggaggaaacgaagatcaaaaacagtttctatacaaaaacctattcgaaaaatggggtaacgtatttttccctttcacgtactcggtatccacctcaaacaactctacggcacaccatattacaacccttgagctaagagacatctgcaaagaggtctatcagagcgattccccggacgcatatgaatctttacttccctacagcactcatccatctttcaaaacattattcgttaaaatctacgttatacctatggtttcacacattaccaatcttacctttgataaattacaatctgattgcagactcttaactctaatccacgcctgcaaactcctactcccctcgcaacatctactactacactacatggcgtggctatatgccttctccataaacgtggaccatatagatctaggcactttcaccgtaataaagtccgtaatctttaaaatcgctgaccacataaacgtgatgacgcatacgatctactccccggagacaaaccttctcgtaagcattctactaaacgcgtataccaactacctccaaaaatacgtaaacccttggatcaaacaaaccataacggcaaacttctccctgatacagacgtacataactttcacgaaacaatgcgccagcatcttggcgaccaaatgcaacataaacttagacaatctatttatctacataactatcggaacagacaaaattgtcaccacttcgttttgctccttcatcgctacatgcaggaatttagtacgtcaacacgaagaattcgaaaaatcactacaaacgatccaaatttccgaaatcacactcacggggatgctacgaaacataatcacgagcgtctcctcctccaaagagctgctaaccaacgaagcactacaaaaattcatcgacactgtccaacgcatctcccaacacgtaaacgaaacataccattctatttccgtgaacctcgaaaaatgtaaaacctcaaacgacatcctaatcgaatccctgaagaagatcatctacatagttgatgtactcagctccaatgcaatcctaaacacgtcgttagcttccagatgtctggaagccgccaacctcgcggtttcgaacaattctttcacaatactcgaaattaaaaaggacgcagttgccgttttcaagccttttataacacaactatttgaaagcatgaaacccaccacaagtttacataagaaattgatgtctacccaaaaactaaccaccgaccacattccatttctcgatacatttgacgataggtacaacctggtcagacacgtcgaacgacaattaaactggtacgctgcacatgctgaggcagcacagcaagatcttattactcctcttaaattttaa

SEQ ID NO: 15462 - DNA, 93 bp, unidentified; identical to SEQ ID NO: 8544
  misc_feature 1..93: note = Synthetic
  source 1..93: mol_type = other DNA

SEQ ID NO: 15463 - DNA, 42 bp, unidentified; identical to SEQ ID NO: 8545
  source 1..42: mol_type = other DNA
  misc_feature 1..42: note = Synthetic

SEQ ID NO: 15464 - DNA, 42 bp, unidentified; identical to SEQ ID NO: 8545
  misc_feature 1..42: note = Synthetic
  source 1..42: mol_type = other DNA

SEQ ID NO: 15465 - DNA, 180 bp, unidentified
  source 1..180: mol_type = other DNA
  misc_feature 1..180: note = Synthetic
aagtgtattccggtgggcatgatgaacggctcgtggggtctcaccagtatcggacactcatttgtcagtctgagtctggcttcatttgctctcgacgtcattctaaatttgcttgtttcgaacacatattccaccctgggtagaggggcagagtcggactgcattgcagagtgtatataa

SEQ ID NO: 15466 - DNA, 180 bp, unidentified; identical to SEQ ID NO: 15465
  misc_feature 1..180: note = Synthetic
  source 1..180: mol_type = other DNA

SEQ ID NO: 15467 - DNA, 60 bp, unidentified; identical to SEQ ID NO: 8547
  misc_feature 1..60: note = Synthetic
  source 1..60: mol_type = other DNA

SEQ ID NO: 15468 - DNA, 30 bp, unidentified; identical to SEQ ID NO: 8548
  source 1..30: mol_type = other DNA
  misc_feature 1..30: note = Synthetic

SEQ ID NO: 15469 - DNA, 6708 bp, unidentified
  misc_feature 1..6708: note = Synthetic
  source 1..6708: mol_type = other DNA
atggaattcgaaatccaaaacagaactacatctgatatactgtatccagaatgccatttgaattctcctatagtcaaagggaaaatagcacaattacatacgattatgagcttaccccaaccatatgatatggatgacagttcaatattaaatataactagacataagctaaagcttaacaaattggataaaagacaacggtctattagaaagttgagacctattttaattgaaaaagtggctgatttaggtaaatacacatttataagatatccagatatgtcttatgatatgttccatctacacattccaggaataaccactagattggatgatctactaggaagagcacagaaaacatataatggaatgacagatggattgaggaacctatggatcaatgttttgtcaaaattagcttccacaaatgatagatgtacttacgatattaatgaagatataagtaatatatccaatgtacatacagtttatcaatcagacaggtggtttggtccctttaagacatggtttactatcaaatacgatatgagaagattgcaaaaagggaagaatgaaatcctatgtagtaatcaaaaagactataatcttctagaggaccttaaaaatatacttgtaatacattcggaatttgtgttagtcttagataaacagagacatagaggatacatgttaaccccagaactagtattaatgtattgtgatgtgattgaaggcagatggaatatcagctcatgtgcaaagttagatcccaaattatattcgatgcatatcaaagggaattctttatgggatgtaatggacggattattccctatattaggagagaaaatctttgatataatatcgttgttggaacctcttgcattgtcgcttattcagacatatgatccggtcaaacaattaagaggagcctttttaaatcatgtattagctgaaatggaatcggtgttaagtaccaaacagaatacagatgaggcaaacaatatagattatattgatagaattctggatgtattcaaggggtcaacaatagatgaaatagcagagattttttcattttttaggacttttggacatcctccattggaagcaagcatagcagctgaaaaagtaagaaagtatatgtatgctgaaaaatctcttaactttgatactataaataaatgtcatgcagtgttctgtacaataatcataaatgggtatcgggaaagacatggtggtcaatggcctccggtcgttttacctgctcatgcgcatgaatttattaggaatgcttatggaactaactcagccttatcatatgagaatgccgtggattattatcaaagtttcatagggattaaatttacccagtttatagagccccagttggatgaggacttaaccatctatatgaaagacaaagcattatctcctaagaaatcaaactgggatactgtttatcctgcagcaaatttgttatatcgtatcagcagttcttgtgaatcaagacgacttgttgaagtcttcattgcagataagaagtttgatcctcaccaagtcttagaatatgtagaatcaggatattggttagaagatccggagtttaatatttcatacagcttgaaagagaaagaaattaaacaagaaggtagattatttgcaaagatgacatataaaatgagagctgctcaagtattagcagagaccctattagcaaataacataggaaagttctttcaagagaatggtatggttaaaggagagatagagctactcaaaagattaactgcaatatcgatgtctggagtacccagacataatgaaatatacaataattccaaaagttattcaaatgaaattaaaaaccatgagacggtcgtgaactctgaattattttctaagaataaaacgaggaaattcgaattcaaatctacagatatatacaatgatggatatgagacgattagttgttttttaactacagatttgaaaaagtattgcttgaactggagatatgaatcaacagcactctttggtgagacttgtaaccagatattcggattaagagagttgtttaactggttacatccacgtcttgaaaatagtacaatatatgtcggagatccctactgtcctcctgctgacacagaacatctatcactagacgaccatcctgattcagggttctatgttcataatccaagaggaggaatagaaggattttgtcaaaaattatggactttgatatctataagtgcaatacatctagcagctgtcaaaattgacgtacgagtaacagcaatggtacaaggggataatcaggccatagctgttacaacgagggtcccaactaactatgattacaaaaccaaaaaagaaatagtttataaagatgtagttagattttttgactcactaagagaggtaatggatgatttaggtcatgagcttaaactcaatgagaccatcatcagtagcaaaatgtttatatatagtaagagaatatattatgatggaaggatccttcctcaagcattaaaagcattatctagatgtgtattctggtctgagacaataatagatgaaactagatcggcttcctctaatttagcaacttcatttgcaaaagctattgaaaacggatactcacctgtattagggtatgtatgctcgatttttaagaatatacaacagttatacatagcattagggatgaatataaatccaactataactcaaaatatcaaagaccagtactttagaaatcccaactggttgaaatatgcctccttgatacctgctagtgtgggaggttttaattatatggctatgtcaagatgctttgtgaggaatataggggatccagcagttgccgcattggcagatattaagagattcattacagtgaacctgatagaccgcggagttctatataggattatgaatcaggaaccaggcgaatcatctttcttagattgggcatcagatccttattcatgtaatctaccacaatctcaaaatattacaaccatgattaagaatattacagcacgaaatgtgttacaagactcaccaaatcctttattatcaggattatttacacctacaatgatagaggaggatgaagaattagctgaattcctgatggataggaagataattctaccaagagttgcacatgatatactagataactcattaactggaatcaggaatgcaatagcagggatgttggacactactaaatcacttataagagtaggaattaatagaggaggcttaacttataacttgttgagaaaaataagtacttatgatcttgtacaatatgagacacttagtaaaacacttaaattagtagtcagtgacaagataaggtatgaggatatgtgttctgttgatttagctatctcattaagacagaagatgtggatacatctatcaggaggaaggataataaatggacttgaaacgccagatcctttagaattactatctggaatattgataacagggtcagaacactgtagaatatgttattcaacagagggtaatagcccatatacctggatgtacctgccgaacaatttaaatattgggtcagctgagtcaggtatttcatcattaagggtcccctactttggatcagtgacagatgaaaggtcagaagcacaattaggttatattaagaatcttagcaaaccagcaaaagctgcaatcagaatagctatgatttacacttgggcatttggaaacgatgaaatatcctggatggaagcatcacaaatcgctcagacacgcgcaaatttcacgttggataaccttaaaatactgaccccagttacaacatctactaacctctcacatagactgaaggatacagcaacacagatgaaattttcgagtacgtctctagtacgagtaagcagattcataacaatatctaatgacaacatgaccattaaagaagcaaatgaaacaaaagacacaaatctaatttaccaacaggtaatgttaacagggctgagcacttttgagtatttattcaggttaagagataatactgggcataacccgattgttatgcatctacatatagaagataaatgctgcatcaaagagagttataatgatgagcatataaatccagagtcaacattagaattaatcaaatatcctgaaagcaacgaatttatttatgataaggatcccttaaaagatatagacctgtcaaaactaatgagcattagagatcattcttacacgatagatatgaattactgggatgatgaggacatcatacatgcaatatcaatatgcactgcctcaacaattgcggatactatgtctcaacttgatagagacaatctcaaagaactagtggtaattgcaaatgatgatgatataaatagcctaataactgaattcttaaccctcgatatcttaatatttcttaaaacatttggaggactattagtgaatcagtttgcatacaccatctatggtctaaagatagaaggccgagaccctatttgggactatataacacgaacactgcgggacacctcacattctgtactcaaagtactatccaatgcattatctcatccaaaggtattcaaacgattctgggattgtggtgtattaaaccctatttatgggccaaatattgcgagccaagatcagattagacttgctctctctgtatgtgaatactcactagatttattcatgagggaatggcttaatgggtcttcacttgaaatctatatttgtgatagtgacatggaaatagcagatgatagaagacaagcattcatttctagacatcttgcttttgtttgttgcttagcagaaatcgcatcttttggaccagatcttacaaatttgacatacctagataggcttgaaacattaaagtgctacctagatctgaatattaaagaagatccaacgctgaaatatgtacaggtatcagggttattaattaaatcattcccctcgactgttacttatgttagaaagacagctatcaaacacttgagaatacgtgggatcagcccccctagtataatagaggactgggaccccgtagaagatgaaaatattctagacaatattgctaaagtcatctctgacaattgcgataacaattggagtaaaaacaagaataaatgtaattatttctggggattatcattaaagaactatcaggtaataaaggtaaggtcgattacaatcaattctgaatttcctgagacatcaatacaaacaaatcatggattattacttcctgaaggtggaaactatctgtcacatcagcttagattatttggagtaaatagtacaagctgtttaaaagcattagaattatcacaaatactaatgagagaagttagtaaggataaagatcgacttttcttaggagagggagcaggagcaatgttagcctgttatgatgcaacacttggccctgcaatgaattattacaattcaggattaaatattacagatgttgttggacagcgtgaattaaagattttcccatcagaagtatctcttgttggcaagaaattaggaaatgtaactcagatccttaaccgagtcaaagtattatttaatgggaatcctaattcaacatggataggaaacatggaatgtgaaagtctgatttggagtgagctaaatgataaatcaattggtttagtacattgtgatatggaaggagcaataggtaagtctgaggaaactgttctacatgagcattatagtgttattaggatcacatatttggtaggggatgatgatgtgattttagtttcaaagatcatcccttcacttacacctaattggtctaagattataaccttatataaactatactggaaggatgtgagaataatatcactcaagacatcaaatccggcatcaacagaactatacttaatatcaaaagaagcatattgtactgtaatggaaccaagtagtgttatattatcaaaactcaataggatatctccaatggaagagaataatttattaaaatggatgattatatcaaagaagaaaaatagcgaatggttgaggcacgaaattaatgaaggggagagagattacgggattatgagaccttatcatacagcattacaaattttcggattccaaattaatctgaatcacttagcaagagagttcttaacgtctccagatctaacaaacatcaatgttattatacagagtttcatcagaacaatgaaagatgtgatatttgaatggattaatatcacccatagtaccaagagatataaattaggaggtaaatataacttatttccattgcgggataaagggaagatgaaattaatatctcgtagagtaatattaagctggatatcattatcgttgtctactagattactaacaggtcgatttccagatgaaaggtttgaaagtagagcacaagcggggtatgtatcattagcagatactgatttggagtctttaagattattacctaagggaattattcagaactataaggatcacataggatcaatctcatactggttcataacaagagagataaagatattgatgaagcttataggaggagttaagctattaggaatcccgaggcaccacaaacagttagatgatcaggtttcccaatatgatgagtaccttaatgaatttgacattgattaa

SEQ ID NO: 15470 - DNA, 15 bp, unidentified
  source 1..15: mol_type = other DNA
  misc_feature 1..15: note = Synthetic
ttggctctattctga

SEQ ID NO: 15471 - DNA, 12 bp, unidentified
  misc_feature 1..12: note = Synthetic
  source 1..12: mol_type = other DNA
atgaaattgtag

SEQ ID NO: 15472 - DNA, 60 bp, unidentified; identical to SEQ ID NO: 8552
  source 1..60: mol_type = other DNA
  misc_feature 1..60: note = Synthetic

SEQ ID NO: 15473 - DNA, 21 bp, unidentified
  source 1..21: mol_type = other DNA
  misc_feature 1..21: note = Synthetic
atgacatgtgtaaagacctaa

SEQ ID NO: 15474 - DNA, 291 bp, unidentified
  source 1..291: mol_type = other DNA
  misc_feature 1..291: note = Synthetic
ctgcggagttgttgctttgttcaggagacgacgacgggagcgaacgggatggcgctggatacgctagcggggctggctatctgcgtgggtctagtcatgggggttaccgtgatcgcgtcgtgcgcgctgctggtgttttattattgcgatgagagggaggatggccgtccgtcgaagctgttgcaacgtagcattcgacgttggcgacacggccttagcaccgaatccttaaccgctatcctgccggacggttcgtccacggagcaggagatctaccacacgcgactttaa

SEQ ID NO: 15475 - DNA, 33 bp, unidentified; identical to SEQ ID NO: 8556
  source 1..33: mol_type = other DNA
  misc_feature 1..33: note = Synthetic

SEQ ID NO: 15476 - DNA, 39 bp, unidentified; identical to SEQ ID NO: 7873
  source 1..39: mol_type = other DNA
  misc_feature 1..39: note = Synthetic

SEQ ID NO: 15477 - DNA, 2055 bp, unidentified
  misc_feature 1..2055: note = Synthetic
  source 1..2055: mol_type = other DNA
atgaagaatcttccgggcgtgttcgcgttccccgacaacgagaccatcttcgcgcacgcgtactcgcagcgcgagctggaagccatgttgcccgcgcgcgcgggcgcgcagccgcacgccttcgcgtacgccgcatggccactgagcaagcaccgctggcgcggcgcgttcgtgtgccggcagcgcggcgtgctgaagctaaacctggagctggacgcgggcgcgttcgagcgcgtgccgcgctccgaggccgagcgtttcgagcccgagcagagcgacgcgcgcgcgctgatgcaccgcggcgcagacggcactgtcatgagcttcgagtgctacagcttcttgcgctgccggcccgggttggagctgcgcgaggcggggctagcgctgctgcgcgggctagtggtgggcggcaaccgcatgcgcatcttctccggcgtgcgccgtgcgggcgccagcgctgccacgtcggccggcatgctaggcaacgaaagtcctttcgagcgcgcgccctttgcgtcgctacgcattgacgcgcaggctgcgctcttccgcgcgtgggcggcgcgcaggcccaccgtggtcactggcggcacgggcgtaggaaagacgtcgcaggtgcccaagctgctgctgtggttcaactacctgttcggcggcacggaagacctggacgtgctggcgcccgcgcgtgagcgcccggtggtgctgtcgctgccgcgcgtggcactagtgcgtatgaacggacacgcgctacggcgcgcgctgggcttcgacgcgctggagggctcgcccgtggagttgcgttacggagacctggcgcccgcagacgccaacagctcgcgtagtccgttccgcttggtggtgtccacaaaccagctcacactgggcgcgctcttcgcgcacggcactgtcatactggacgaggtgcacgagcacgaccagatggccgacatcatgctggccgtgctacgcgtgcaccgcgcgcgcgtggactcgatcgtgctcatgtccgccacactggaggacgaccgcgagcgcctgcaggagttctttcccgacgccgagttcgtgcacatccccgggtccacgcgcttcgagatacgtggcgtgtacgtgcgcaacagcagcgacccgcgcgacgcgcgcgcatacgacgaggaggagcgccgcaatgtgtcggccgcgctcagcgctcaccgcccgcgcgctgggcgctgcggcatcctcttcgtagcgtcggtcgcgcagtgcgaggactatgcgcgcctgctaacgcgggagcacccggaactgggcgtatacgtggtgcacggtaagacgcccaacgtggacgcgctgctggcagaggtctacgcgtccgcgcgcccatgcgtgctggtgtccacgccgtacctggaatccagcgtgactatccgcacggtcacgcacgtgtacgacacggggcgcgtcttcgttcctgcgccctttggggggcggcagatgctcatctcgcccgccatgcgcacgcagcgcaggggccgcgtcggccgtgtaatgcccggcacgtacgtgtacttttacgaccccgcgcggctggcgcccatcaagcgcatcgattccgagttcctgtacaactacatcatttacgcacggcactacgggctggtgttgccggacgacctctacgtgcagccgtccgacctagagctgctgcgtcgttgcgaggagtacctggacggcttcgggcttgcgcccgagcggcttttcgagctggccagcacgcgctacctgcgcatggtagagtacgcgaagatttacgcgcgcggcggtgcgcgcgccgaggagctcaaccgcttcgagcgcgacggagtggtgaccgaggacgtgctcgccagcatccgcgcgctcaacctgcgcgcgcgtgtgctaagcgcgcgtgcgcgacgcgggcagttcctgcacacgtgcgaggtggccttcgggccgtacgctggcacgcgcttcctgttagcaaaccggcggcggctacgcggcgacatcttcatggttacggagcgtagcttcgtgctctag

SEQ ID NO: 15478 - DNA, 2031 bp, unidentified
  misc_feature 1..2031: note = Synthetic
  source 1..2031: mol_type = other DNA
atgaccgcaccacgctcgcgggcccccactacgcgtgcgcggggggacacggaagcgctgtgctcccccgaggacggctgggtaaaggttcaccccacccccggtacgatgctgttccgcgagattctccacgggcagctggggtataccgagggccagggggtgtacaacgtcgtccggtccagcgaggcgaccacccggcagctgcaggcggcgatctttcacgcgctcctcaacgccaccacttaccgggacctcgaggcggactggctcggccacgtggcggcccgcggtctgcagccccaacggctggttcgccggtacaggaacgcccgggaggcggatatcgccggggtggccgagcgggtgttcgacacgtggcggaacacgcttaggacgacgctgctggactttgcccacgggttggtcgcctgctttgcgccgggcggcccgagcggcccgtcaagcttccccaaatatatcgactggctgacgtgcctggggctggtccccatattacgcaagcgacaagaagggggtgtgacgcagggtctgagggcgtttctcaagcagcacccgctgacccgccagctggccacggtcgcggaggccgcggagcgcgccggccccgggttttttgagctggcgctggccttcgactccacgcgcgtggcggactacgaccgcgtgtatatctactacaaccaccgccggggcgactggctcgtgcgagaccccatcagcgggcagcgcggagaatgtctggtgctgtggccccccttgtggaccggggaccgtctggtcttcgattcgcccgtccagcggctgtttcccgagatcgtcgcgtgtcactccctccgggaacacgcgcacgtctgccggctgcgcaataccgcgtccgtcaaggtgctgctggggcgcaagagcgacagcgagcgcggggtggccggtgccgcgcgggtcgttaacaaggtgttgggggaggacgacgagaccaaggccgggtcggccgcctcgcgcctcgtgcggcttatcatcaacatgaagggcatgcgccacgtaggcgacattaacgacaccgtgcgtgcctacctcgacgaggccggggggcacctgatagacgccccggccgtcgacggtaccctccctggattcggcaagggcggaaacagccgcgggtctgcgggccaggaccagggggggcgggcgccgcagcttcgccaggccttccgcacggccgtggttaacaacatcaacggcgtgttggagggctatataaataacctgtttggaaccatcgagcgcctgcgcgagaccaacgcgggcctggcgacccaattgcaggagcgcgaccgcgagctccggcgcgcaacagcgggggccctggagcgccagcagcgcgcggccgacctggcggccgagtccgtgaccggtggatgcggcagccgccctgcgggggcggacctgctccgggccgactatgacattatcgacgtcagcaagtccatggacgacgacacgtacgtcgccaacagctttcagcacccgtacatcccttcgtacgcccaggacctggagcgcctgtcgcgcctctgggagcacgagctggtgcgctgttttaaaattctgtgtcaccgcaacaaccagggccaagagacgtcgatctcgtactccagcggggcgatcgccgcattcgtcgccccctactttgagtcagtgcttcgggccccccgggtaggcgcgcccatcacgggctccgatgtcatcctgggggaggaggagttatgggatgcggtgtttaagaaaacccgcctgcaaacgtacctgacagacatcgcggccctgttcgtcgcggacgtccagcacgcagcgctgcccccgcccccctccccggtcggcgccgatttccggcccggcgcgtccccgcggggccggtccagatcgcggtcgcccggaagaactgcgcgaggcgcgccggaccagggcgggggcatcgggcaccgggatggccgccgcgacggccgacgatga

SEQ ID NO: 15479 - DNA, 363 bp, unidentified
  source 1..363: mol_type = other DNA
  misc_feature 1..363: note = Synthetic
atggttcttccaatcctgcctccgccccctttaaatgatagacaaggcagcattaactggatggggatggcctacagagtcctggctgatgtgttgaggggaattcgcatggacgggctttttgtttcatcagatacagaggaacttcttcacaacctttgggaatggatgtacttcagttggatggttgagcggcaacagcgaaaggacggtcggaggagaggtatctgctgttccagggccactttctgctggcagaagtacaacgaggtacgcaagagggtgcactacaatgagcaccgaggaacaatcgaccttgctccgccatcatccatatcgcagggcccgtttatcacgatatga

SEQ ID NO: 15480 - DNA, 63 bp, unidentified; identical to SEQ ID NO: 251
  misc_feature 1..63: note = Synthetic
  source 1..63: mol_type = other DNA

SEQ ID NO: 15481 - DNA, 39 bp, unidentified; identical to SEQ ID NO: 8572
  misc_feature 1..39: note = Synthetic
  source 1..39: mol_type = other DNA

SEQ ID NO: 15482 - DNA, 21 bp, unidentified
  source 1..21: mol_type = other DNA
  misc_feature 1..21: note = Synthetic
ataaaaatccacaacagttga

SEQ ID NO: 15483 - DNA, 63 bp, unidentified; identical to SEQ ID NO: 8576
  misc_feature 1..63: note = Synthetic
  source 1..63: mol_type = other DNA

SEQ ID NO: 15484 - DNA, 63 bp, unidentified; identical to SEQ ID NO: 8576
  source 1..63: mol_type = other DNA
  misc_feature 1..63: note = Synthetic

SEQ ID NO: 15485 - DNA, 3417 bp, unidentified
  misc_feature 1..3417: note = Synthetic
  source 1..3417: mol_type = other DNA
ttggttgtcagaccagatttcccgaggatggcgcccccgggaatgcgcctgaggtcgggacggagcaccggcgcgcccttaacgagaggaagttgtaggaaacgaaacaggtctccggaaagatgtgaccttggcgatgacctacatctacaaccgcgaaggaagcatgtcgccgactccgtcgacggccgggaatgtggaccccacaccttgcctataccaggaagtcccacagtgttcacatccgggctgccagcatttgtgtctagtcctactttaccggtggctcccattccttcacccgctcccgcaacacctttacctccaccggcactcttaccccccgtaaccacgtcttcctccccaatccctccatcccatcctgtgtctccggggaccacggatactcattctccatctcctgcattgccacccacgcagtctccagagtcttctcaaaggccaccgctttcaagtcctacaggaaggccagactcttcaacacctatgcgtccgccaccctcgcagcagactacacctccacactcacccacgactcctccacccgagcctccctccaagtcgtcaccagactctttagctccgtctaccctgcgtagcctgagaaaaagaaggctatcgtccccccaaggtccctctacactaaacccaatatgtcagtcgcccccagtctctccccctagatgtgacttcgccaaccgtagtgtgtaccccccatgggccacagagtccccgatctacgtgggatcatccagcgatggcgatactccgccacgccaaccgcctacatctcccatctccataggatcatcatccccgtctgagggatcctggggtgatgacacagccatgttggtgctccttgcggagattgcagaagaagcatccaagaatgaaaaagaatgttccgaaaataatcaggctggcgaggataatggggacaacgagattagcaaggaaagtcaggttgacaaggatgacaatgacaataaggatgatgaggaggagcaggagacagatgaggaggacgaggaggatgacgaggaggatgacgaggaggatgacgaggaggatgacgaggaggatgacgaggaggatgacgaggaggatgacgaggaggaggacgaggaggaggacgaggaggaggacgaggaggaggacgaggaggaggaggaggacgaggaggatgacgatgatgaggacaatgaggacgaggaggatgacgaggaggaggacaagaaggaggacgaggaggacgggggcgatggaaacaaaacgttgagcatccaaagttcacaacagcagcaggagccacaacagcaggagccacagcagcaggagccacaacagcaggagccacagcagcaggagccacagcagcaggagccacaacagcaggagccacagcagcaggagccacaacagcgggagccacagcagcgggagccacagcagcgggagccccagcagcgggagccccagcagcgggagccccagcagcgggagccccagcagcgggagccccagcagcgggagccacagcagcgggagccacagcagcgggagccacagcagcgggagccccagcagcgggagccacagcagcaggagccacagcagcaggagccacagcagcaggagccacagcagcaggagccacagcagcaggagccacagcagcaggagccacagcagcaggagccacaacagcaggagccacaacagcaggagccacaacagcaggagccacaacagcaggagccacaacagcaggagccacagcagcaggatgagcagcagcaggatgagcagcagcaggatgagcagcagcaggatgagcagcagcaggatgagcagcagcaggatgagcagcagcaggatgagcagcagcaggatgagcaggagcagcaggatgagcagcagcaggatgagcagcagcagcaggatgaacaggagcagcaggaggagcaggagcagcaggaggagcagcagcaggatgagcagcagcaggatgagcagcagcaggatgagcagcagcaggatgagcaggagcagcaggatgagcagcagcaggatgagcagcagcagcaggatgaacaggagcagcaggaggagcaggagcagcaggaggagcaggagcagcaggaggagcaggagcagcaggaggagcaggagcaggagttagaggagcaggagcaggagttagaggagcaggagcaggagttagaggagcaggagcaggagttagaggagcaggagcaggagttagaggagcaggagcaggagttagaggagcaggagcaggagttagaggagcaggagcaggagttagaggagcaggagcaggagttagaggagcaggagcaggagttagaggagcaggagcaggagttagaggagcaggagcaggagttagaggagcaggagcaggagttagaggagcaggagcaggagttagaggagcaggagcaggagcaggagttagaggaggtggaagagcaagagcaggagcaggaagagcaggaattagaggaggtggaggagcaagagcaggagcaggaggagcaggaggagcaggagttagaggaggtggaagagcaggaagagcaggagttagaggaggtggaagagcaggaagagcaggagttagaggaggtggaagagcaggagcagcagggggtggaacagcaggagcaggagacggtggaagagcccataatcttgcacgggtcgtcatccgaggacgaaatggaagtggattaccctgttgttagcacacatgaacaaattgccagtagcccaccaggagataatacaccagacgatgacccacaacctggcccatctcgcgaataccgctatgtactcagaacatcaccaccccacagacctggagttcgtatgaggcgcgttccagttacccacccaaaaaagccacatccaagataccaacaaccaccggtcccttacagacagatagatgattgtcctgcgaaagctaggccacaacacatcttttatagacgctttttgggaaaggatggaagacgagatccaaagtgtcaatggaagtttgcagtgattttttggggcaatgacccatacggacttaaaaaattatctcaggccttccagtttggaggagtaaaggcaggccccgtgtcctgcttgccccaccctggaccagaccagtcgcccataacttattgtgtatatgtgtattgtcagaacaaagacacaagtaagaaagtacaaatggcccgcctagcctgggaagctagtcaccccctggcaggaaacctacaatcttccatagttaagtttaaaaagcccctgccattaacccagccaggggaaaaccaaggtcctggggactctccacaggaaatgacataa

SEQ ID NO: 15486 - DNA, 3399 bp, unidentified
  misc_feature 1..3399: note = Synthetic
  source 1..3399: mol_type = other DNA
ttggttgtcagaccagatttcccgaggatggcgcccccgggaatgcgcctgaggtcgggacggagcaccggcgcgcccttaacgagaggaagttgtaggaaacgaaacaggtctccggaaagatgtgaccttggcgatgacctacatctacaaccgcgaaggaagcatgtcgccgactccgtcgacggccgggaatgtggaccccacaccttgcctataccaggaagtcccacagtgttcacatccgggctgccagcatttgtgtctagtcctactttaccggtggctcccattccttcacccgctcccgcaacacctttacctccaccggcactcttaccccccgtaaccacgtcttcctccccaatccctccatcccatcctgtgtctccggggaccacggatactcattctccatctcctgcattgccacccacgcagtctccagagtcttctcaaaggccaccgctttcaagtcctacaggaaggccagactcttcaacacctatgcgtccgccaccctcgcagcagactacacctccacactcacccacgactcctccacccgagcctccctccaagtcgtcaccagactctttagctccgtctaccctgcgtagcctgagaaaaagaaggctatcgtccccccaaggtccctctacactaaacccaatatgtcagtcgcccccagtctctccccctagatgtgacttcgccaaccgtagtgtgtaccccccatgggccacagagtccccgatctacgtgggatcatccagcgatggcgatactccgccacgccaaccgcctacatctcccatctccataggatcatcatccccgtctgagggatcctggggtgatgacacagccatgttggtgctccttgcggagattgcagaagaagcatccaagaatgaaaaagaatgttccgaaaataatcaggctggcgaggataatggggacaacgagattagcaaggaaagtcaggttgacaaggatgacaatgacaataaggatgatgaggaggagcaggagacagatgaggaggacgaggaggatgacgaggaggatgacgaggaggatgacgaggaggatgacgaggaggatgacgaggaggatgacgaggaggatgacgaggaggatgacgaggaggaggacgaggaggaggacgaggaggaggacgaggaggaggaggacgaggaggaggaggaggacgaggaggatgacgatgatgaggacaatgaggacgaggaggatgacgaggaggaggacaagaaggaggacgaggaggacgggggcgatggaaacaaaacgttgagcatccaaagttcacaacagcagcaggagccacagcagcaggagccacagcagcaggagccacaacagcaggagccacaacagcaggagccacagcagcaggagccacaacagcaggagccacagcagcaggagccacaacagcgggagccacagcagcgggagccacagcagcgggagccccagcagcgggagccccagcagcgggagccccagcagcgggagccccagcagcaggagccacagcagcaggagccacagcagcaggagccacagcagcaggagccacagcagcaggagccacagcagcaggagccacagcagcaggagccacagcagcaggagccacagcagcaggagccacagcagcaggagccacaacagcaggagccacaacagcaggagccacaacagcaggagccacaacagcaggagccacaacagcaggagccacagcagcaggatgagcagcagcaggatgagcagcagcaggatgagcagcagcaggatgagcagcagcaggatgagcagcagcaggatgagcaggagcagcaggatgagcagcagcaggatgagcagcagcagcaggatgaacaggagcagcaggaggagcaggagcagcaggaggagcaggagcagcaggaggagcaggagcagcaggaggagcaggagcaggagttagaggagcaggagcaggagttagaggagcaggagcaggagttagaggagcaggagcaggagttagaggagcaggagcaggagttagaggagcaggagcaggagttagaggagcaggagcaggagttagaggagcaggagcaggagttagaggagcaggagcaggagttagaggagcaggagcaggagttagaggagcaggagcaggagttagaggagcaggagcaggagttagaggagcaggagcaggagttagaggagcaggagcaggagttagaggagcaggagcaggagttagaggagcaggagcaggagttagaggagcaggagcaggagttagaggagcaggagcaggagttagaggagcaggagcaggagttagaggagcaggagcaggagttagaggagcaggagcaggagttagaggagcaggagcaggagttagaggagcaggagcaggagttagaggagcaggagcaggagcaggagttagaggaggtggaagagcaagagcaggagcaggaagagcaggaattagaggaggtggaggagcaagagcaggagcaggaggagcaggaggagcaggagttagaggaggtggaagagcaggaagagcaggagttagaggaggtggaagagcaggaagagcaggagttagaggaggtggaagagcaggagcagcagggggtggaacagcaggagcaggagacggtggaagagcccataatcttgcacgggtcgtcatccgaggacgaaatggaagtggattaccctgttgttagcacacatgaacaaattgccagtagcccaccaggagataatacaccagacgatgacccacaacctggcccatctcgcgaataccgctatgtactcagaacatcaccaccccacagacctggagttcgtatgaggcgcgttccagttacccacccaaaaaagccacatccaagataccaacaaccaccggtcccttacagacagatagatgattgtcctgcgaaagctaggccacaacacatcttttatagacgctttttgggaaaggatggaagacgagatccaaagtgtcaatggaagtttgcagtgattttttggggcaatgacccatacggacttaaaaaattatctcaggccttccagtttggaggagtaaaggcaggccccgtgtcctgcttgccccaccctggaccagaccagtcgcccataacttattgtgtatatgtgtattgtcagaacaaagacacaagtaagaaagtacaaatggcccgcctagcctgggaagctagtcaccccctggcaggaaacctacaatcttccatagttaagtttaaaaagcccctgccattaacccagccaggggaaaaccaaggtcctggggactctccacaggaaatgacataa

SEQ ID NO: 15487 - DNA, 8346 bp, unidentified
  misc_feature 1..8346: note = Synthetic
  source 1..8346: mol_type = other DNA
atcgtaaacgtagcgtccctaccagttgagcgcgtaattttcgtaagcaataaaatggatataattccgcctatagctgtcactgttgcgggagtgggaagccgtaatcaatttgacggtgccctgggaccggcgtcaggtctgtcatgtttaagaacatctttatcgtttttgcatatgacatatgcgcatggaattaatgcaaccctgtcatcagacatgattgatggatgtttacaagagggtgcagcatggactacggatctgtctaatatggggaggggtgtcccagatatgtgtgctcttgttgatctccccaatcgaatttcatatattaaactgggggacactaccagtacgtgctgcgttttgtctagaatatacggcgatagccatttttttaccgttccagacgagggttttatgtgcacacaaattcccgctagagcgtttttcgatgatgtgtggatgggacgtgaagagtcgtatacaattataactgtagactcaacgggaatggccatctatcgtcagggaaacatatcttttatttttgatccacatggccatgggactataggacaggctgtagttgttcgggtgaataccacggatgtgtactcttatatcgcatcggagtatacccaccgccccgataacgtagaatcccaatgggccgctgcattagttttttttgtcaccgcaaacgacggtcccgtaagcgaagaagcgctatcttcggcagtaacgcttatatacggaagctgtgatacatattttacagatgaacaatattgcgaaaaactggttacagctcaacatccgttgcttctttcacctcctaattccacgacaattgtgcttaataaatcgtctatagtacctcttcaccaaaacgttggtgaaagtgtatccttggaagcaaccctacattcaacgttaaccaacacggttgcactggaccctagatgtagttacagcgaggttgatccttggcatgcggttctagaaacaacctcgactgggtctggcgttttggattgtcgtcgtagacgccgtccttcatggactcctccttcaagcgaggaaaatttagcttgtatcgacgatggcttggtaaataatacacattccacggataatttacataaacccgctaaaaaggttctcaaatttaaaccaactgtagacgtgccggataaaacacaagtggcacatgtattaccccgcctacgagaagttgctaacaccccagacgttgtgttaaatgtatccaatgtagatacgcctgaatccagtcccactttttcacggaacatgaatgtaggaagcagtttgaaagatcggaagccatttctatttgaacagagtggtgatgtcaacatggttgtcgaaaaactactacaacatgggcatgaaattagcaatggatacgtacaaaatgcggtgggtacgttggatactgttattaccggtcatacaaatgttcccatttgggtaacaaggcccttggttatgccagacgaaaaggatccattggagctttttattaacctcaccattttgcgtttaacgggatttgtggtggaaaatggaacacgtacacatcatggtgctacaagcgttgtatcagactttataggtccccttggggaaattttaacaggatttccctccgccgcggaacttatacgcgttacaagtttgatattaacaaacatgccgggggcggaatatgctattaaaactgttctccggaaaaaatgtacaattggcatgctcattatcgctaagtttggtctagttgccatgcgggttcaggatacaaccggcgctttacatgccgaactagatgtgttagaagcggatctaggaggttcgtcgcccatagacctctattctagactgtcgacaggtcttataagtatactaaattcgcctattatttctcatcccggactttttgccgagcttattccaacccgtacagggtccctgtctgaacgaatacgtcttctttgtgaattagtctcggcccgggagacacgctatatgcgtgaacacaccgcgcttgtttctagtgtaaaggctttagagaatgcattacggtctacccgcaataaaattgatgccattcaaataccagaagttccccaggaacccccggaagaaaccgacattccacccgaagagttaattcggcgtgtatatgagatacgatccgaagttacaatgctattgacctcggctgttacagaatacttcacccgcggagtgttatatagcacacgggccttgatcgctgaacaatcccctaggcgttttcgggtcgcgaccgcaagtacggcacccattcaacggcttttagattctcttccggaattcgacgctaaattaacggcaatcatatcgtccctgtctatacaccctcctcctgagactatacaaaatctccccgtcgtatctctgttaaaagagcttattaaagaaggggaagatttaaacacagacacggctctcgtatcgtggttatctgtagtcggggaagctcaaaccgcaggttacttatccagacgagagttcgatgaattatcacgtacaattaaaaccattaatacacgcgcaacgcaacgggcttccgcggaagcagagttgtcttgctttaatacgctaagcgcggccgtagaccaagccgtaaaggactatgaaacatataacaatggtgaggtcaagtatcctgaaataacacgggatgatttattagcaacaattgtacgtgctacagacgatttggtgcgacagataaaaattttaagtgatccaatgatccaatccggtttacaaccttcgattaaaagacgattggaaacaaggcttaaagaggttcagacgtatgcaaacgaggcccgaaccacacaggacacaataaagagtcgaaaacaggcggcatataataaactcggggggttacttcgcccggtaaccggttttgtgggacttagggctgcagtagatttattaccggaacttgcttctgagttagatgtccaaggagccctggtaaatctcaggaccaaagtcttagaggcgccggtagagatccgttctcaacttacgggtgatttctgggcgttatttaaccaatatcgagacattttagaacatcccggaaacgcacgcacatctgtcttaggaggactgggagcttgttttacagctattatcgaaattgtgccgatacctacggagtatagaccatcattgcttgcgttttttggtgacgtggcagatgtgcttgcatccgacatcgcgaccgtatctactaacccggaaagtgagtccgccataaacgctgttgttgcaactcttagtaaagcgacgttagtttcatctacagtgccagccttatcctttgtgttgtcgttatataaaaaatatcaggctttacaacaagaaattacgaatacccataagttgactgaattacaaaaacaacttggagatgacttctccaccctagctgtctcatctggacacttgaagtttatatcatcttcaaatgtagatgattatgaaataaacgatgcgatattatcaatacaaacaaatgtgcacgccctaatggatacggttaaacttgttgaagttgaactgcaaaagctacccccccattgtattgctgggacatctaccttatctcgagtagtaaaggatcttcataaactcgtcacaatggcacatgagaagaaggaacaggcaaaagtgttaattaccgattgtgaacgtgcacataaacaacaaacgactcgggttttgtatgagcgttggacacgtgatattatagcatgtctggaggcaatggaaacgcgccatatatttaacgggacagaactggcacggttgcgagatatggccgctgcgggagggtttgatatacacgcagtttacccacaagcacgtcaggttgtagcggcatgtgaaactacagccgttacggcattagatactgtgtttcgccacaatccatatacccccgaaaatacaaatattccaccacctttggctttgttaagagggttaacatggtttgatgatttttcgattacggctcccgtattcaccgttatgtttccaggtgttagtattgagggactccttctgcttatgcgtattcgcgcggttgtgttattatccgccgatacgtctattaatggaatacctaactaccgagatatgatattacgaacctcgggggatctattacaaatacccgcattggctgggtatgttgatttttacacacggtcttatgatcagtttataaccgaaagtgtaacgttaagtgaacttagagcagacatcagacaggctgccggggctaaacttacagaagcaaataaggctttggaggaagtaactcatgttcgggcacacgaaacggctaaacttgcacttaaagaaggtgtcttcattacattaccaagcgaaggtttattgattcgggctatagagtattttacaactttcgatcataaacgatttataggaacggcatatgaaagagttttacaaacaatggtagaccgcgatctaaaggaggccaacgcagagcttgcacagtttcgtatggtgtgtcaggcaacaaagaaccgtgcaatacaaattttacaaaacattgttgatacggccaatgccactgagcaacaagaagacgtggatttcactaacctgaagacgttattaaaactaaccccccctcccaaaacaattgcattggccattgatagatctacttccgttcaggacattgtcacgcagtttgcattgctgttagggcgtctggaagaagaaactggtacgttggacattcaggcggttgactggatgtaccaagctcgcaatattattgactcccatccactaagtgtgcgtatagacggtaccggccccctgcatacttataaagatagggtggataaactttatgcgttacgaactaaattagatctcctacgacgacgaatagaaaccggtgaggttacgtgggacgatgcatggacaacatttaaaagagaaacgggggatatgttggcatcgggggacacgtacgctacttccgtagatagtataaaggcactccaggcatcggcgtctgtggttgacatgctttgttccgaacccgaattttttttattgcctgtggaaacgaaaaaccgtctccaaaaaaagcaacaggaacgtaaaacggcgttggatgttgtgttgcaaaaacaaagacagtttgaagagaccgcgtctcgcttacgagctttaattgaacgtattccaacggagagtgaccatgacgttcttcgtatgttattacgtgatttcgatcaatttacacatttgcctatatggataaaaacacagtatatgacatttcgaaatttactcatggtacggttaggcttgtatgcaagttatgctgagatttttccacccgcgtctccaaacggagtatttgctcctattcccgccatgtcgggtgtatgtctagaagaccaatcccgatgcattcgcgcgcgggtggccgcgtttatgggggaggcgtctgtggtgcaaacgtttagggaagccagatcttctatagacgctttgtttggaaaaaatttaaccttttacttggatactgatggggttccacttcgatatagagtgtgttataaatcagttggggttaaacttggaaccatgctatgcagtcagggtggattatctttacgaccggcacttcccgatgaaggtattgtggaagaaactacactatcggcattacgcgtggccaatgaggtcaatgagctacgcattgaatacgaatccgctataaaatccgggttttctgccttttccacctttgttaggcatcgccacgccgaatggggtaaaaccaacgcacgcagagccattgcagagatatacgccggccttataacaacaacattgacacgacaatacggggttcattgggacaagcttatttattcttttgaaaaacaccacctaacttctgtaatgggcaatggactaactaaaccaatccagagaaggggtgatgtacgcgtattagagttaaccctatctgatattgtaactattttggttgccacaaccccggtacatcttctcaattttgctagattggatttaattaaacagcatgagtatatggcccgtaccctcagacccgtaatcgaggccgcatttagaggtcgtttactcgttcgctcattggatggagacccgaaaggcaatgcccgggccttttttaatgccgccccatccaaacataaactcccgttagctcttggatcaaaccaagatcctaccggcgggagaatatttgcatttcggatggcagattggaaacttgttaaaatgccacagaaaataacggatccttttgcgccatggcaactttcccccccccccggggtaaaggccaatgtcgatgcagttacccgtataatggcaacagatcgtcttgcgaccattactgtacttgggcgcatgtgtctcccgccaatttccttagtgtcaatgtggaatacgctgcaaccggaggaattcgcatacagaacacaagatgatgtggacattatagttgatgcgagactggatttgtcatccacgcttaatgcaagatttgataccgctcccagcaataccacgttagagtggaatacagaccgtaaagtaattacagatgcttatattcaaaccggggcaacgacagtttttacagtaacgggggcggcaccaactcacgtttctaatgtaacagcgtttgacatagcaactacggctattttatttggggctcctttggttattgccatggaacttacatccgttttttcacaaaattccggacttactttggggttaaaattattcgattcccggcatatggctacagattcgggtatatcctcagccgtatctcccgatattgtttcttgggggttacgtttactgcatatggatcctcacccaattgaaaatgcatgtttaattgtccaactagaaaaactgtccgcgctcattgcaaacaaacctcttacaaacaatcccccgtgtttactgctattggacgaacatatgaatccctcttatgttttatgggaacgaaaagactcgattccagctccggattatgtggtcttttgggggccagaatctcttattgatttgccgtacatcgactccgatgaggactctttcccctcgtgtcccgatgatccattttactcgcaaattattgccggttatgcgccccaaggccccccaaacctcgacacaactgatttttacccaacggagccactatttaagtctcccgttcaagttgttagaagttccaaatgtaaaaaaatgcccgtccggcccgcgcagcccgcgcagcccgcgcagcccgcgcagcccgcgcagaccgtccagcccgcgcagcccatagaaccgggcacacaaatagtggtacaaaattttaagaaaccccaaagcgtaaaaacaacccttagccaaaaagatattcccttgtatgtggaaaccgaatcagaaacggctgtgcttatacctaagcaattaaccacctccattaaaacaaccgtttgtaaaagtattaccccaccaaataaccaattgtcggattggaaaaataatccacagcaaaaccaaacgttaaaccaagcgttcagtaaaccaatacttgagattacctccattccgacagatgactcgatatcttaccggacttggattgaaaaatcaaatcaaacacaaaaacggcatcaaaatgaccctcgaatgtataactccaaaacagtattccaccctgtaaataaccaattaccttcttgggttgacacggcagccgatgccccccaaacggacctattgacaaactataaaacaagacagccgtcgccaaactttccgcgggacgtacacacatggggcgtatcttctaacccgtttaactcaccgaacagagacctatatcaaagtgattttagtgaaccttctgacggctatagcagtgagagtgaaaattctatcgtactaagtctcgacgaacatcggtcatgtcgcgttcctaggcacgtacgcgttgttaatgccgatgtagtcaccggtcgacgttatgtccgagggaccgccttgggagcactggcactgttaagccaggcatgtcggcgtatgatcgacaacgttagatatacacgtaaacttttaatggaccacacggaagatatatttcaaggcctggggtatgttaaattgttattagatggaacatatatataa

SEQ ID NO: 15488 - DNA, 42 bp, unidentified; identical to SEQ ID NO: 8584
  misc_feature 1..42: note = Synthetic
  source 1..42: mol_type = other DNA

SEQ ID NO: 15489 - DNA, 78 bp, unidentified; identical to SEQ ID NO: 8585
  misc_feature 1..78: note = Synthetic
  source 1..78: mol_type = other DNA

SEQ ID NO: 15490 - DNA, 1719 bp, unidentified; identical to SEQ ID NO: 12677
  misc_feature 1..1719: note = Synthetic
  source 1..1719: mol_type = other DNA

SEQ ID NO: 15491 - DNA, 660 bp, unidentified; identical to SEQ ID NO: 9972
  misc_feature 1..660: note = Synthetic
  source 1..660: mol_type = other DNA

SEQ ID NO: 15492 - DNA, 144 bp, unidentified; identical to SEQ ID NO: 8620
  source 1..144: mol_type = other DNA
  misc_feature 1..144: note = Synthetic

SEQ ID NO: 15493 - DNA, 18 bp, unidentified
  source 1..18: mol_type = other DNA
  misc_feature 1..18: note = Synthetic
acggtttaccgaaaataa

SEQ ID NO: 15494 - DNA, 18 bp, unidentified
  source 1..18: mol_type = other DNA
  misc_feature 1..18: note = Synthetic
acggtttaccgaaaataa

SEQ ID NO: 15495 - DNA, 18 bp, unidentified
  misc_feature 1..18: note = Synthetic
  source 1..18: mol_type = other DNA
acggtttaccgaaaataa

SEQ ID NO: 15496 - DNA, 18 bp, unidentified
  misc_feature 1..18: note = Synthetic
  source 1..18: mol_type = other DNA
acggtttaccgaaaataa

SEQ ID NO: 15497 - DNA, 1152 bp, unidentified
  source 1..1152: mol_type = other DNA
  misc_feature 1..1152: note = Synthetic
atggagccgctgctgcggtatctacactccgtggaggatcgctacgtgcgcaccatcttcaacttccacatccggcacgtgcccgacgtgcctgccatctacgagcccatcaaggcgcgcatcgcgggcacgcagctcttccacgaagtcgttccggacgtgcacgcacgcgcgggcatcaagaagttcatctactgcgacatccacatgaccaagcacattctcaaccatgcggcgtacgcgcagggagctgcggacgcgggccgcgcgcacaagatggcgcagcacttcgacgtggtactggcgcccggcgccgacagcgcgcgcacgcgcgacatcttcctgcgcgacaagtcctcgctgctgtcttacatcaagacgaccagcaagaaaagcaagatcgactacggcgagatcaagaagaccatccactgcgcgggcggcggcgcggcgggctactactcgggccgccgcagcgacgagtacctgagcactaccgtgtgcgtagacagcgcgcggccctggatcaagagcgtgtccaagcgcctgcgcgtggacatcgcacggcacgccatcgtcacgcgcggcaagagctcgatcctgcagaccattgaggtcatttacgtcaaccgcacctgcgtcaagatcttcaaggattccacggtacacgtgatcctgtccaaggacaaagcggagcgccgctgcgtagacctggtggaccggctcttcggcacctaccgagcactcttcgcgctgctgcacgcgctcacgcagcacgcgcccttccgcgcgcatgccgcggccgccgacgccgtgctggcggcgcccggcttcgacgagaagctggcgcttatccgcgcacacgcgcacatgtacggcgtacacaacttccgcgtgggcatgttcaacctcacgtacacgccgcacattgccttcaccgtcttcccgtcactactggaccacaagagtaagatcaaattcttcaagggcaagaagctgaacatcgtggcgctgagctcgctacaggagtgcgcgtactacgtgggctgcgcggaggcgctgttgcgcaccatgcagctgcgctccgagcgcttggacgccacggacgtgctcgcggccagcgtggaggaactcaaggagctgctgttgtga

SEQ ID NO: 15498 - DNA, 108 bp, unidentified; identical to SEQ ID NO: 8626
  source 1..108: mol_type = other DNA
  misc_feature 1..108: note = Synthetic

SEQ ID NO: 15499 - DNA, 129 bp, unidentified; identical to SEQ ID NO: 3342
  source 1..129: mol_type = other DNA
  misc_feature 1..129: note = Synthetic

SEQ ID NO: 15500 - DNA, 234 bp, unidentified
  source 1..234: mol_type = other DNA
  misc_feature 1..234: note = Synthetic
atgggatcctgttgtggtagattctgtgacaagaataagaataagaataagaaggaagatgtagaagcgggaggagaaggatattacgattataagaacattaatgatctggatgaattcgaagcacgtgtagaatttggaccattatatatgataaatgaagaaaaatcagacataaatacattggatataaaaagaagatatagacacacgatagagtctgtatatttctaa

SEQ ID NO: 15501 - DNA, 48 bp, unidentified; identical to SEQ ID NO: 8628
  source 1..48: mol_type = other DNA
  misc_feature 1..48: note = Synthetic

SEQ ID NO: 15502 - DNA, 27 bp, unidentified
  misc_feature 1..27: note = Synthetic
  source 1..27: mol_type = other DNA
atgcccaatttggatatagcagcctga

SEQ ID NO: 15503 - DNA, 33 bp, unidentified; identical to SEQ ID NO: 8631
  source 1..33: mol_type = other DNA
  misc_feature 1..33: note = Synthetic

SEQ ID NO: 15504 - DNA, 27 bp, unidentified
  misc_feature 1..27: note = Synthetic
  source 1..27: mol_type = other DNA
atgcccaatttggatatagcagcctga

SEQ ID NO: 15505 - DNA, 138 bp, unidentified
  misc_feature 1..138: note = Synthetic
  source 1..138: mol_type = other DNA
ctgaaaataaaaaaccgctccttccgctcgctcacccgcagctgtctgtaccacaagagagaagaccagctgcagcgcaccctggacgacgccgaagcactgttcagcaaatactgctcagcgtctcttaaagactaa

SEQ ID NO: 15506 - DNA, 48 bp, unidentified; identical to SEQ ID NO: 8636
  source 1..48: mol_type = other DNA
  misc_feature 1..48: note = Synthetic

SEQ ID NO: 15507 - DNA, 2001 bp, unidentified
  misc_feature 1..2001: note = Synthetic
  source 1..2001: mol_type = other DNA
atgttcatgtatccggaatttgcaaggaaggctttatcaaagcttatttcaaaaaaattaaacattgaaaaggtgtctagcaagcaccagctcgtgttactggattatggattacacggactattgccaaaatcactgtatctggaagctattaactccgacattctcaatgttaggttttttcctcctgaaataataaacgtcactgatatcgttaaggctctccaaaattcttgtagagtagatgagtacctaaaagctgtttccttatatcataagaattctttaatggtatcgggaccaaatgtagtcaagcttatgatagaatataatcttcttacacatagtgacttggaatggttaattaatgagaatgtaatcaaggctacataccttttaaaaatcaatgcctatatgattaactttaaaatagatctaacggttgatgaaataattgacttagttaaagatattcctgtaggagctacactacatctatataatatattaaacaatctagatttgaacattattcttcgtatatctgatgaatataatataccacctgttcacgatattctgtctaaacttacagatgaagagatgtgtataaagctagttacaaagtatcctatggaaaatgttataaattttattaatcaagatgttagatatagtcccaccttcatcaagacaattaaagattttgttaatgcgcatcttccaaccatgtacgacggattaaatgattatctgcactctgttattgtcgacaaggacctaatagaggaatataaaattaaatccgttgccatgtttaatttggaatacaagactgatgtagatactctaacattggacgaacagatatttgtagaggtaaacatctcatattatgattttagatatagacaatttgccaatgaatttagagattacatcatgttaaaagaaagcagacaaatcaccatgcaaacaggtgataaaataagaaggtttagacgtcccatgtcattgagatccactattatcaaaaaggatactgattctctagaggatattctctcacatatagataatgccagaaaaaatagcaaggtatctattgaagatgtagatagaatcatttcatcttttcgtcttaatccctgtgttgtcagacgcaccatgctatctaatatagatatcaaaacaaagataatggtactgaaaattgcaaaagattggaaatcctgtgctctgacactgtccgccataaaaggtattatggtaacagataccatcaatacagtgttatcaaaaattctacatcatcataggaatgtcttcaagtatcttacatctgtagataataaagaaattactgtctgtaattgttccaggtgtgtgtctctcttctatagagaattaaaaagtatacgatgtgacctaaacaccgacgatggattgttggctagattatacgatctgactagatacgccttacatggaagaatcaatcaaaacttaatcggtcaaagatgttggggtccattgacagaaatgctgtttaatgaggataaaaagagaaaactaaacaatttgatggtgtacatcaaaatatcagacatgttggtatacggacactccattgagaaaacacttattccgattactgagtctctttcattcaagctatctgttgataccatgtccgtatcaaatgatcaatatgccaaggttgttatcttcttcaataccatcatagaatatattgtggccaccatctattatagattggcagttttgaacaattatgtcgccatcagacatttcgtattaaaagtgttacacactgttatggaagcatgtggcgtactgttttcacacattaaagttaatgacaaaatagagcatgaattggaggagatggtagacaaaggtattgtaccttcttatttgcatcatctgtccatcaacgtcatttcaataatattggatgatataaatggaactcgttaa

SEQ ID NO: 15508 - DNA, 90 bp, unidentified
  source 1..90: mol_type = other DNA
  misc_feature 1..90: note = Synthetic
atggattacacggactattgccaaaatcactgtatctggaagctattaactccgacattctcaatgttaggttttttcctcctgaaataa

SEQ ID NO: 15509 - DNA, 57 bp, unidentified; identical to SEQ ID NO: 8640
  misc_feature 1..57: note = Synthetic
  source 1..57: mol_type = other DNA

SEQ ID NO: 15510 - DNA, 78 bp, unidentified; identical to SEQ ID NO: 8641
  misc_feature 1..78: note = Synthetic
  source 1..78: mol_type = other DNA

SEQ ID NO: 15511 - DNA, 27 bp, unidentified
  source 1..27: mol_type = other DNA
  misc_feature 1..27: note = Synthetic
atgcccaatttggatatagcagcctga

SEQ ID NO: 15512 - DNA, 27 bp, unidentified
  source 1..27: mol_type = other DNA
  misc_feature 1..27: note = Synthetic
atgcccaatttggatatagtagcctga

SEQ ID NO: 15513 - DNA, 42 bp, unidentified; identical to SEQ ID NO: 8645
  misc_feature 1..42: note = Synthetic
  source 1..42: mol_type = other DNA

SEQ ID NO: 15514 - DNA, 648 bp, unidentified; identical to SEQ ID NO: 12303
  misc_feature 1..648: note = Synthetic
  source 1..648: mol_type = other DNA

SEQ ID NO: 15515 - DNA, 87 bp, unidentified; identical to SEQ ID NO: 8650
  misc_feature 1..87: note = Synthetic
  source 1..87: mol_type = other DNA

SEQ ID NO: 15516 - DNA, 123 bp, unidentified
  misc_feature 1..123: note = Synthetic
  source 1..123: mol_type = other DNA
atgcttctcctgcaagtactgttcatgctacagcaacgataccgctacaagcctcactccctttcggatggcttgttattggcgttgcatttcttgctgtttttcagagcgctaccaaaataa

SEQ ID NO: 15517 - DNA, 18 bp, unidentified
  misc_feature 1..18: note = Synthetic
  source 1..18: mol_type = other DNA
atgaaaaacaatacttaa

SEQ ID NO: 15518 - DNA, 75 bp, unidentified; identical to SEQ ID NO: 8654
  misc_feature 1..75: note = Synthetic
  source 1..75: mol_type = other DNA

SEQ ID NO: 15519 - DNA, 909 bp, unidentified
  misc_feature 1..909: note = Synthetic
  source 1..909: mol_type = other DNA
atggctggcttcctaggtgcgttcagaggcgtgtgctccgaaatatggcagtcgctccgtggacacggacaccaccactcttccaactgtccgcgacgacgcgccaacagcatggacgagcgcgaccggcgccggcaccgccaccgcgagatccccgacagctcggcgtcgctgaaccgcgacctgatgccgcgacgcagtgcgggcgcgctccggcaccacgaccgctgcccctcggaaaagagcagacactcctccgacaggcaccgctcggcggaccgacaccaatcggcggacagggaccgacaccgccgcggtcgcaagaactacgactcgcacccgtcgcgcaagaaccgcgactacgagcgggcagactaccagggatacccctcacaaacccacccagacgcccccgcgcagacctcgacgctcaaggtgacctccctcagcaccagctgcagcaccctgtcccaacatcactacgagacccctgaccacgtctacgacgtcccggaagacagtcgcggggcgtcgctccccccttgcgcggaccttgcgctccccccgctcgccatgcccaactccaagccctcgcgccgcatgcgcccggcgtccatgagcgacttcccaatgaagcactgtggcgccagcaaacccaacctccaagacgacatatgcacactatgcactgatatagagacacaactgagtgcactagagaagtctctggagtcagagctcaacttctatcgtcgctacatacaagacactaagacactactcgccacgcgagcagcaaacatcggcagcaaagctctgatctacaccaacgactacaacaacagtggcaacgtcggcgaagaggagcactgctcggaggagtgctgcaaagtggaggaagttctgtga

SEQ ID NO: 15520 - DNA, 156 bp, unidentified; identical to SEQ ID NO: 8664
  source 1..156: mol_type = other DNA
  misc_feature 1..156: note = Synthetic

SEQ ID NO: 15521 - DNA, 165 bp, unidentified
  source 1..165: mol_type = other DNA
  misc_feature 1..165: note = Synthetic
atgcattcttattctatatccggtgttaaaaaaaattatcctatcatgtatttgagagtcttatatgtagcaaacatgatagctgtgatgccaataagctttagatattcacgcgtgctagtgttggggatggtattatctggcggtgaaatgtccgttatataa

SEQ ID NO: 15522 - DNA, 1593 bp, unidentified
  misc_feature 1..1593: note = Synthetic
  source 1..1593: mol_type = other DNA
atggccgggatattcgagagcgtgaaggatctagagaatcacaagataaggctggaagcaccaagagggggatccagattattggtgggaaagaaagattcaactcctatctgtattccgaattttgatgaccaggaaggagcgagtgctgtggccttcatgctcagaatgctgaccatctgtataacatccacagttaacatgacggtaagaggggcagctctgatcagcgctatgttgtctaactctgaacaaccctcagtgatgatgaccaactacgctctagatcaggacaaaacgtatgtgcagtattttgtcacatccatgctcagcgaattcccattcatggagataacgaacagaggaatcaagctggaaaacatgatgacctggtatggtaagatggtcacagaaaacgactacgaccagttgttcccctcttctcagaacgatgcgtgttccctagtaagcgcagagctcaaaaattccgggttaaacatggtcctagggacattgtttatccagatctggatctgcctgaccaaagcagtaacaaaccctgatgtcggagaggttgccttcaacaagaggatgacaaagttgatccagcagaagagagtctgccctaaactagtcatgtcacaatctgcactcaaggccatacgggaggttttggcaagacagcaaaatgtccgagcctttatggtaaacttcctgattgatcttcaggggtcagggactacctcctcatcaacggagcggatggtaattgacatcgggacatatatctctgaagcgggcatggcagggttcatgaatacgatagaatatggactcaagactaggtatccggccctggccacagcagagctccgcccatcattggaaaagatggagtccctgataacactttataaaagcaagggaccgctagggccctatatgaacatcttagaagacccagatgctgtcaaattcgcacctggggcctacccattgctctggagctatgcgatgggtgtggcagtggccacaaacaaggacatgactggtctggttgttgaaaggagcttcctctctgggagatggtttagagctggacaagacatcgtcagaagtcaagccctgaggtacaacaaagacatgatccagcaattgagcctagatgattcagacattgacgagctgaacatggtcataaacggagaacacagcaagaccggagaattcatcaaagccaaagggacgcatgccggtgtagaaggagaggacgacattgagggagaggaaggtcgagaggtcctgagaagggaggaatcggagttcgtagacatgcctgctggatcatcaatcaggggatacgccagtggttacggcaaggagattgatagagccagtgttgggaattcacaccctcaagctgtctttaggtttggggaccgttcccagcacaaaacagtcagcgatcctgccagaagagatcagctgaaagacattctcaaacgaaagctggctgaggagatgggggaaccagtaccggaaaacctagatgcggacgccagcagtgatgcaatgctgctgaagggcatctag

SEQ ID NO: 15523 - DNA, 42 bp, unidentified; identical to SEQ ID NO: 8674
  source 1..42: mol_type = other DNA
  misc_feature 1..42: note = Synthetic

SEQ ID NO: 15524 - DNA, 81 bp, unidentified; identical to SEQ ID NO: 8675
  misc_feature 1..81: note = Synthetic
  source 1..81: mol_type = other DNA

SEQ ID NO: 15525 - DNA, 57 bp, unidentified; identical to SEQ ID NO: 8676
  source 1..57: mol_type = other DNA
  misc_feature 1..57: note = Synthetic

SEQ ID NO: 15526 - DNA, 60 bp, unidentified; identical to SEQ ID NO: 8677
  misc_feature 1..60: note = Synthetic
  source 1..60: mol_type = other DNA

SEQ ID NO: 15527 - DNA, 636 bp, unidentified
  source 1..636: mol_type = other DNA
  misc_feature 1..636: note = Synthetic
aggaagactgtcaacaccactgataaaatgaactttctacgcaagatagttaggaattgcaaggatgaggacgaccagaagccccctcttgcatctacgcttccgaatgacgacgacctgtggcttccccctcccgaatatgttcctctaaccgagatcaccggtaaaaagaatatgcgaaatttatgtatcaatggtgaggtcaaagtttgtagtcctaatggttactcgttcaggatcttgagacatatcctggaatctcttgacgagatctactcggggaaccatagaatgatcgggctggtcaaagtggtcatggatctgacattatctggagctccctgtccagaagggatgaattgggtctataagctgaggcggactctgatatttcaatgggcagaatcccgcggtccattggacggagaagagctggaatactctcaggaaatcacatgggatgatgactctgagtttgtcggcctacagataagggtgagtgccagacaatgccatattcagggccggatttggtgcatcaacatgaattccagggcatgccagctatggtccgacatgtctctcaaaacccaacaatctgaagatcacaaaaatagttctctcctcttagaatag

SEQ ID NO: 15528 - DNA, 87 bp, unidentified
  source 1..87: mol_type = other DNA
  misc_feature 1..87: note = Synthetic
atgaggacgaccagaagccccctcttgcatctacgcttccgaatgacgacgacctgtggcttccccctcccgaatatgttcctctaa

SEQ ID NO: 15529 - DNA, 774 bp, unidentified
  source 1..774: mol_type = other DNA
  misc_feature 1..774: note = Synthetic
atgaggcacctgagagacctgcccgatgagaaaatcatcatcgcttccgggaacgagattctggaactggtggtaaatgccatgatgggcgacgaccctccggagccccccaccccatttgaggcaccttcgctacacgatttgtatgatctggaggtggatgtgcccgaggacgaccccaacgaggaggcggtaaatgatttatttagcgatgccgcgctgctagctgccgaggaggcttcgagccctagctcagacagcgactcttcactgcatacccctagacccggcagaggtgagaaaaagatccccgagcttaaaggggaagagatggacttgcgctgctatgaggaatgcttgcccccgagcgatgatgaggacgagcaggcgatccagaacgcagcgagccagggaatgcaagccgccagcgagagttttgcgctggactgcccgcctctgcccggacacggctgtaagtcttgtgaatttcatcgcttgaatactggagataaagctgtgttatgtgcactttgctatatgagagcttacaaccattgtgtttacagtcccgtctctgacgcagatgatgagacccccactacagagtccacttcgtcacccccagaaattggcacatctccacctgagaatattgttagaccagttcctgttagagccactgggaggagagcagctgtggaatgtttggatgacttgctacaggctggggatgaacctttggacttgtgtacccggaaacgccccaggcactaa

SEQ ID NO: 15530 - DNA, 51 bp, unidentified; identical to SEQ ID NO: 8682
  source 1..51: mol_type = other DNA
  misc_feature 1..51: note = Synthetic

SEQ ID NO: 15531 - DNA, 1005 bp, unidentified
  misc_feature 1..1005: note = Synthetic
  source 1..1005: mol_type = other DNA
acgttgagcaaaattgttaaaaatatgaggcgggttatattgcctactgctcctcctgaatatatggaggccatataccctgtcaggtcaaattcaacaattgctagaggtggcaacagcaatacaggcttcctgacaccggagtcagtcaatggggacactccatcgaatccactcaggccaattgccgatgacaccatcgaccatgccagccacacaccaggcagtgtgtcatcagcattcatccttgaagctatggtgaatgtcatatcgggccccaaagtgctaatgaagcaaattccaatttggcttcctctaggtgtcgctgatcaaaagacctacagctttgactcaactacggccgccatcatgcttgcttcatacactatcacccatttcggcaaggcaaccaatccacttgtcagagtcaatcggctgggtcctggaatcccggatcatcccctcaggctcctgcgaattggaaaccaggctttcctccaggagttcgttcttccgccagtccaactaccccagtatttcacctttgatttgacagcactcaaactgatcacccaaccactgcctgctgcaacatggaccgatgacactccaacaggatcaaatggagcgttgcgtccaggaatttcatttcatccaaaacttcgccccattcttttacccaacaaaagtgggaagaaggggaacagtgccgatctaacatctccggagaaaatccaagcaataatgacttcactccaggactttaagatcgttccaattgatccaaccaaaaatatcatgggaatcgaagtgccagaaactctggtccacaagctgaccggtaagaaggtgacttctaaaaatggacaaccaatcatccctgttcttttgccaaagtacattgggttggacccggtggctccaggagacctcaccatggtaatcacacaggattgtgacacgtgtcattctcctgcaagtcttccagctgtgattgagaagtaa

SEQ ID NO: 15532 - DNA, 42 bp, unidentified; identical to SEQ ID NO: 6321
  source 1..42: mol_type = other DNA
  misc_feature 1..42: note = Synthetic

SEQ ID NO: 15533 - DNA, 597 bp, unidentified
  source 1..597: mol_type = other DNA
  misc_feature 1..597: note = Synthetic
ataagggtgcaatttagaagaaaacagaagaaaatggaagaagaaacgatacagaatatgactaaaatgctaatggcgacactaactgatcacatagattttaataaaatacttcaaacaacagttacggctatagtagcttttttctttaataaaaagatggcaactcctattatcaagaaagtcctatcaaaagtaaaagaaaaaatcaatgaaaaaatagatagcgtaattgatcagtcaatgctaagactaggaacgactcaaaattcgaaagaaatggtgacaaattgtatagcacaagaaatgcgtaagtttgacacaataatgaaaaatcttgaagatacaacgcttgattttgatgttatggctaggtttgatgagaaaacagttgacattgacaagaaaatacgtggaattgaagaatcaatggaaagaagaatgaaagattttgagattaaaatgaatgcattgatgaaatcagtaacacagtgcactaaaaagaaagaaacaccaatagttcatattgcacaacaagataaagtacagctgtacacaggaccaaaaaaagagtatgatcctcgtgacaagttgtaa

SEQ ID NO: 15534 - DNA, 2058 bp, unidentified
  source 1..2058: mol_type = other DNA
  misc_feature 1..2058: note = Synthetic
gtgaaatataatatagtaataattagaactagaatagctatggattgcggcagagattgcactattctatgtcgtctactggatgaagatgtgacgtacaaaaaaataaaactagagattgaaacgtgtcataacttatcaaagcatatagatagacgaggaaacaatgcgctacattgttacgtctccaataaatgcgatacagacattaagattgttcggctgttgctctctcgcggagtcgagagactttgtagaaacaacgaaggattaactccgctaggagtatacagtaaacgtaaatacgtcaaatctcagattgtgcatctactgatatccagctattctaatgcctccaacgaactcacgtcgaatataaatgatttcgatctgtattcgtatatgtcttcggataatatagacttacgtctactaaaatatctaattgtggataaacggatacgtccgtccaagaatacgaactactacatccattgtctcggattggtggatatatacgtaacgacgcctaatccgagaccagaagtattgctatggcttcttaaatcagaatgttacagcaccggttacgtatttcgtagctgtatgtacgatagcgataggtgtaagaactctcttcattactatatattgtctcatagagaatctgaatctctatccaaggatgtaattaaatgtttgatcgataacaatgtttccatccatggcagagacgaaggaggatctttacccatccaatactactggtcttgctcaaccatagatatagagattgtcaaattattaataaaggatgtggacacgtgtagcgtatacgacgacatcagtcagccatatattaggggagtactagcggattatctaaacaagcgatttagagtaaccccatataatgtagacatggaaatcgttaatcttcttattgagggacgtcatactcttatcgacgtaatgcgtagtattacttcgtacgattccagagaatataaccactacatcatcgataacattctaaagagatttagacaacaggatgaatccatcgtacaagctatgttgataaactacttacattacggcgatatggtaagtatacctatcctccgatgcatgttggataacggagcgaccatggataagacgacggacaacaactatcctctacacgattactttgttaataataataatatcgtcgatgtaaacgtcgtaaggtttatcgtggaaaataatggacacatggctattaatcacgtatcgaacaatggacgtctatgcatgtacggtctgatattatcgagatttaataattgcgggtatcactgttatgaaaccatactgatagatgtatttgatatactaagcaagtacatggatgatatagatatgatcgataacgagaataaaactttactatattacgcggtcgatgtcaataatatacaatttgcaaggcggttattggaatatggagcgagcgttaacacaacgtcgcgctcgataatcaatacggccatccagaaaagcagttaccgaagagaaaacaaaacaaagctagttgatttattacttagctaccatcccactctagagactatgattgacgcatttaatagagatatacgctatctatatcctgaaccattattggcctgtatcagatacgccttaatcctagataatgattttccttctaaagtaaagtatgatatcgccggtcgtcataaggaactaaagcgctatagagcagacattaatagaatgaagaatgcctacatatcaggcgtctccatgtttgatatattatttaaacggaacagacgtcacagattgagatacgcaaagaatccgacatttataaactttgtatccaacatcaaatggtacaaaaaagaactaacgtccatcattacagagactgtaaagaacagtgagaggatcgactccatagtggacaacattaatacagacgataacttgatttcgaaattacccatggagatacaacgcgaaatactttattactccattaaataa

SEQ ID NO: 15535 - DNA, 2058 bp, unidentified; identical to SEQ ID NO: 15534
  misc_feature 1..2058: note = Synthetic
  source 1..2058: mol_type = other DNA

SEQ ID NO: 15536 - DNA, 39 bp, unidentified; identical to SEQ ID NO: 8699
  misc_feature 1..39: note = Synthetic
  source 1..39: mol_type = other DNA

SEQ ID NO: 15537 - DNA, 774 bp, unidentified
  source 1..774: mol_type = other DNA
  misc_feature 1..774: note = Synthetic
atgaggcacctaagagacctgcccgatgaggaaattatcatcgcttccgggagcgagattctggaactggtggtaaatgctatgatgggcgacgaccatccggaaccccccaccccatttgagacaccttcgctgcacgatttgtatgatctggaggtggatgtgcccgaggacgaccccaacgagaaggcggtaaatgatttatttagcgatgccgcgctgctagctgccgaggaggcttcaagccctagctcagacagcgactcttcactgcatacccctagacacgacagaggtgagaaagagatccccgggcttaaatgggaaaagatggacttgcgttgctatgaggaatgcctgcccccaagcgatgatgaggacgagcaggcgattcagaacgcagcgagccatggagtgcaagccgtcagcgagagctttgcactggactgcccgcctttgcccggacacggctgtaagtcttgtgaatttcatcgcatcaatactggagataaagctgtgttatgtgcactttgctatatgagagcgtacaaccattgtgtttacagtcccgtttctgacgcagatgatgagacccccactacagagtccactttgtcaccccctgaaattggcacgtctccatctgacaatattgttagaccagttcctgtaagagccactgggaggagagcagctgtagaatgtttggatgatttgcttcagggtggagatgaacctttggacttgtgtacccggaaacgccccaggcattaa

SEQ ID NO: 15538 - DNA, 6630 bp, unidentified
  misc_feature 1..6630: note = Synthetic
  source 1..6630: mol_type = other DNA
atgggtgctcaggtttcatcacagaaagtgggcgcacatgaaaactcaaatagagcgtatggtggttctaccattaattacaccaccattaattattatagagattcagctagtaacgcggcttcgaaacaggacttctctcaagacccttccaagttcaccgagcccatcaaggatgtcctgataaaaacagccccaatgctaaactcgccaaacatagaggcttgcgggtatagcgatagagtactgcaattaacactgggaaactccactataaccacacaggaggcggctaattcagtagtcgcttatgggcgttggcctgaatatctgagggacagcgaagccaatccagtggaccagccgacagaaccagacgtcgctgcatgcaggttttatacgctagacaccgtgtcttggacgaaagagtcgcgagggtggtggtggaagttgcctgatgcactgagggacatgggactctttgggcaaaatatgtactaccactacctaggtaggtccgggtacaccgtgcatgtacagtgtaacgcctccaaattccaccagggggcactaggggtattcgccgtaccagagatgtgtctggccggggatagcaacaccactaccatgcacaccagctatcaaaatgccaatcctggcgagaaaggaggcactttcacgggtacgttcactcctgacaacaaccagacatcacctgcccgcaggttctgcccggtggattacctccttggaaatggcacgttgttggggaatgcctttgtgttcccgcaccagataataaacctacggaccaacaactgtgctacactggtactcccttacgtgaactccctctcgatagatagtatggtaaagcacaataattggggaattgcaatattaccattggccccattaaattttgctagtgagtcctccccagagattccaatcaccttgaccatagcccctatgtgctgtgagttcaatggattaagaaacatcaccctgccacgcttacagggcctgccggtcatgaacacccctggtagcaatcaatatcttactgcagacaacttccagtcaccgtgtgcgctgcctgaatttgatgtgaccccacctattgacatacccggtgaagtaaagaacatgatggaattggcagaaatcgacaccatgattccctttgacttaagtgccacaaaaaagaacaccatggaaatgtatagggttcggttaagtgacaaaccacatacagacgatcccatactctgcctgtcactctctccagcttcagatcctaggttgtcacatactatgcttggagaaatcctaaattactacacacactgggcaggatccctgaagttcacgtttctgttctgtggattcatgatggcaactggcaaactgttggtgtcatacgcgcctcctggagccgacccaccaaagaagcgtaaggaggcgatgttgggaacacatgtgatctgggacataggactgcagtcctcatgtactatggtagtgccatggattagcaacaccacgtatcggcaaaccatagatgatagtttcaccgaaggcggatacatcagcgtcttctaccaaactagaatagtcgtccctctttcgacacccagagagatggacatccttggttttgtgtcagcgtgtaatgacttcagcgtgcgcttgttgcgagataccacacatatagagcaaaaagcgctagcacaggggttaggtcagatgcttgaaagcatgattgacaacacagtccgtgaaacggtgggggcggcaacatctagagacgctctcccaaacactgaagccagtggaccaacacactccaaggaaattccggcactcaccgcagtggaaactggggccacaaatccactagtcccttctgatacagtgcaaaccagacatgttgtacaacataggtcaaggtcagagtctagcatagagtctttcttcgcgcggggtgcatgcgtgaccattatgaccgtggataacccagcttccaccacgaataaggataagctatttgcagtgtggaagatcacttataaagatactgtccagttacggaggaaattggagttcttcacctattctagatttgatatggaacttacctttgtggttactgcaaatttcactgagactaacaatgggcatgccttaaatcaagtgtaccaaattatgtacgtaccaccaggcgctccagtgcccgagaaatgggacgactacacatggcaaacctcatcaaatccatcaatcttttacacctacggaacagctccagcccggatctcggtaccgtatgttggtatttcgaacgcctattcacacttttacgacggtttttccaaagtaccactgaaggaccagtcggcagcactaggtgactccctttatggtgcagcatctctaaatgacttcggtattttggctgttagagtagtcaatgatcacaacccgaccaaggtcacctccaaaatcagagtgtatctaaaacccaaacacatcagagtctggtgcccgcgtccaccgagggcagtggcgtactacggccctggagtggattacaaggatggtacgcttacacccctctccaccaaggatctgaccacatatggattcggacaccaaaacaaagcggtgtacactgcaggttacaaaatttgcaactaccacttggccactcaggatgatttgcaaaacgcagtgaacgtcatgtggagtagagacctcttagtcacagaatcaagagcccagggcaccgattcaatcgcaaggtgcaattgcaacgcaggggtgtactactgcgagtctagaaggaaatactacccagtatccttcgttggcccaacgttccagtacatggaggctaataactattacccagctaggtaccagtcccatatgctcattggccatggattcgcatctccaggggattgtggtggcatactcagatgtcaccacggggtgatagggatcattactgctggtggcgaagggttggttgcattttcagacattagagacttgtatgcctacgaagaagaagccatggaacaaggcatcaccaattacatagagtcacttggggccgcatttggaagtggatttactcagcagattagcgacaaaataacagagttgaccaatatggtgaccagtaccatcactgaaaagctacttaagaacttgatcaagatcatatcctcactagttattataactaggaactatgaagacaccacaacagtgctcgctaccctggcccttcttgggtgtgatgcttcaccatggcagtggcttagaaagaaagcatgcgatgttctggagataccttatgtcatcaagcaaggtgacagttggttgaagaagtttactgaagcatgcaacgcagctaagggactggagtgggtgtcaaacaaaatctcaaaattcattgattggctcaaggagaaaattatcccacaagctagagataagttggaatttgtaacaaaacttagacaactagaaatgctggaaaaccaaatctcaactatacaccaatcatgccctagtcaggaacaccaggaaattctattcaataatgtcagatggttatccatccagtctaagaggtttgcccctctttacgcagtggaagccaaaagaatacagaaactagagcatactattaacaactacatacagttcaagagcaaacaccgtattgaaccagtatgtttgctagtacatggcagccccggaacaggtaaatctgtagcaaccaacctgattgctagagccatagctgaaagagaaaacacgtccacgtactcgctacccccggatccatcacacttcgacggatacaaacaacagggagtggtgattatggacgacctgaatcaaaacccagatggtgcggacatgaagctgttctgtcagatggtatcaacagtggagtttataccacccatggcatccctggaggagaaaggaatcctgtttacttcaaattacgttctagcatccacaaactcaagcagaatttccccccccactgtggcacacagtgatgcattagccaggcgctttgcgttcgacatggacattcaggtcatgaatgagtattctagagatgggaaattgaacatggccatggctactgaaatgtgtaagaactgtcaccaaccagcaaactttaagagatgctgtcctttagtgtgtggtaaggcaattcaattaatggacaaatcttccagagttagatacagtattgaccagatcactacaatgattatcaatgagagaaacagaagatccaacattggcaattgtatggaggctttgtttcaaggaccactccagtataaagacttgaaaattgacatcaagacgagtccccctcctgaatgtatcaatgacttgctccaagcagttgactcccaggaggtgagagattactgtgagaagaagggttggatagtcaacatcaccagccaggttcaaacagaaaggaacatcaacagggcaatgacaattctacaagcggtgacaaccttcgccgcagtggctggagttgtctatgtcatgtataaactgtttgctggacaccagggagcatacactggtttaccaaacaaaaaacccaacgtgcccaccattcggacagcaaaggtacaaggaccagggttcgattacgcagtggctatggctaaaagaaacattgttacagcaactactagcaagggagagttcactatgttaggagtccacgacaacgtggctattttaccaacccacgcttcacctggtgaaagcattgtgatcgatggcaaagaagtggagatcttggatgccaaagcgctcgaagatcaagcaggaaccaatcttgaaatcactataatcactctaaagagaaatgaaaagttcagagacattagaccacatatacctactcaaatcactgagacaaatgatggagtcttgatcgtgaacactagcaagtaccccaatatgtatgttcctgtcggtgctgtgactgaacagggatatctaaatctcggtgggcgccaaactgctcgtactctaatgtacaactttccaaccagagcaggacagtgtggtggagtcatcacatgtactgggaaagtcatcgggatgcatgttggtgggaacggttcacacgggtttgcagcggccctgaagcgatcatacttcactcagagtcaaggtgaaatccagtggatgagaccttcgaaggaagtgggatatccaatcataaatgccccgtccaaaaccaagcttgaacccagtgctttccactatgtgtttgaaggggtgaaggaaccagcagtcctcactaaaaacgatcccaggcttaagacagactttgaggaggcaattttctccaagtacgtgggtaacaaaattactgaagtggatgagtacatgaaagaggcagtagaccactatgctggccagctcatgtcactagacatcaacacagaacaaatgtgcttggaggatgccatgtatggcactgatggtctagaagcacttgatttgtccaccagtgctggctacccttatgtagcaatgggaaagaagaagagagacatcttgaacaaacaaaccagagacactaaggaaatgcaaaaactgctcgacacatatggaatcaacctcccactggtgacttatgtaaaggatgaacttagatccaaaacaaaggttgagcaggggaaatccagattaattgaagcttctagtttgaatgactcagtggcaatgagaatggcttttgggaacctatatgctgcttttcacaaaaacccaggagtgataacaggttcagcagtggggtgcgatccagatttgttttggagcaaaattccggtattgatggaagagaagctgtttgcttttgactacacagggtatgatgcatctctcagccctgcttggttcgaggcactaaagatggtgcttgagaaaatcggattcggagacagagttgactacatcgactacctaaaccactcacaccacctgtacaagaataaaacatactgtgtcaagggcggtatgccatctggctgctcaggcacttcaatttttaactcaatgattaacaacttgattatcaggacactcttactgaaaacctacaagggcatagatttagaccacctaaaaatgattgcctatggtgatgatgtaattgcttcctacccccatgaagttgacgctagtctcctagcccaatcaggaaaagactatggactaactatgactccagctgacaaatcagctacatttgaaacagtcacatgggagaatgtaacattcttgaagagattcttcagggcagacgagaaatacccatttcttattcatccagtaatgccaatgaaggaaattcatgaatcaattagatggactaaagatcctaggaacactcaggatcacgttcgctctctgtgccttttagcttggcacaatggcgaagaagaatataacaaattcctagctaaaatcaggagtgtgccaattggaagagctttattgctcccagagtactcaacattgtaccgccgttggcttgactcattttag

SEQ ID NO: 15539 - DNA, 300 bp, unidentified
  misc_feature 1..300: note = Synthetic
  source 1..300: mol_type = other DNA
ataacaaaagctgcagcctgttacagtctacataatataatcaaacaactacaagaagttgaagttaggcaggctagagataacaaactatctgacagcaaacatgtagcacttcacaacttagtcctatcttatatggagatgagcaaaactcctgcatctttaatcaacaatctcaagagactgccgagagagaaactgaaaaaattagcaaagctcataattgacttatcagcaggtgctgaaaatgactcttcatatgccttgcaagacagtgaaagcactaatcaagtgcagtga

SEQ ID NO: 15540 - DNA, 51 bp, unidentified; identical to SEQ ID NO: 8704
  misc_feature 1..51: note = Synthetic
  source 1..51: mol_type = other DNA

SEQ ID NO: 15541 - DNA, 870 bp, unidentified
  source 1..870: mol_type = other DNA
  misc_feature 1..870: note = Synthetic
acgcacgcgagaaaaaatacctccttcaaatcatcacgcatggccgcccttagcgtgcacgacgtgcactcggcggcacagcggcgcgcgccaagccagcaaacgcttttcacgcgcgggctgcgcccgctcatgcgcaacacgtacctcttccacaactatgcgtacggctggattcccgccactgccgcgtggagtagccgctttgcggatctggacgttaccgactattacccggtctcgctggggctgctgcgtaagctcgagttcatgttctcgctgtaccgcgggccgccgctacagtacctgccgcgcgtgaacacggagttcgtgtccacaggcgcgtttctgggccgtttcgacgacttcttcaaacgcttcgcgatcttgcccacgcgcgagttcatcagcttcttgctgctgacctctcttcccgcgtacaacttgctctttgtcttccgcggcacgcgttttgagcttgacaagcacacacttttcagcgccttctacaccacacgcgagcggcacgtggagctagcgcgctatttccggcacgggggcgactacaagccgctgtttgggcacccagacgctaccggcgacggtagtgtcacgggcgacggcaggagcctcccgcgaggtagcgcctccgcgctgatgtccaacggccctcgcggcaggctcgttccgtcggactacgagacgctggccaacctcagcgccatcctgtacttcacggactacgaccccgtgctgatgttcctggcgttctacatcccgtccttctcggtcaccaccaagatcacgccgggcgtggagtacctcatggagcgtttgcaagtgcgtctggaagacgtcactctggtctga

SEQ ID NO: 15542 - DNA, 201 bp, unidentified
  misc_feature 1..201: note = Synthetic
  source 1..201: mol_type = other DNA
attttatttcccacgatctattgtagattgaacgccatcaactactgtcagtatttaaaaacctttctcgtccagcgggcacagcctgcagcctgcgatcatactctggtgttggagagcaaggtggacacggtaaggcaggtcctgcgcaagatcgtgagcacggacgccgtattctccgaggcgcgggcacggccctga

SEQ ID NO: 15543 - DNA, 201 bp, unidentified; identical to SEQ ID NO: 15542
  misc_feature 1..201: note = Synthetic
  source 1..201: mol_type = other DNA

SEQ ID NO: 15544 - DNA, 537 bp, unidentified; identical to SEQ ID NO: 14165
  misc_feature 1..537: note = Synthetic
  source 1..537: mol_type = other DNA

SEQ ID NO: 15545 - DNA, 228 bp, unidentified
  source 1..228: mol_type = other DNA
  misc_feature 1..228: note = Synthetic
gtgaacagtacatttcaccagatgcagaagcattcaataaatacatgctgtcgaagtctccagaggatattggaccatctgattctgcttcaaacgatccactcaccagtttttcgattagatcgaatgcagttaagacaaatgcagacgctggcgtgtctatggattcatcagcacaatcacgaccttcaagtaatgtcggatgcgatcaagtggatttctccttaa

SEQ ID NO: 15546 - DNA, 12 bp, unidentified
  source 1..12: mol_type = other DNA
  misc_feature 1..12: note = Synthetic
atgggtggctaa

SEQ ID NO: 15547 - DNA, 12 bp, unidentified
  misc_feature 1..12: note = Synthetic
  source 1..12: mol_type = other DNA
atgggtggctaa

SEQ ID NO: 15548 - DNA, 132 bp, unidentified
  source 1..132: mol_type = other DNA
  misc_feature 1..132: note = Synthetic
ttggctgccgcttcacctatggattttgtgctcgctgcttgccttcttgccgcttctggttttcattggtgccgccgattgtgggttgattgcgtcgcttttggcaatatacccatcctggctttcggctag

SEQ ID NO: 15549 - DNA, 132 bp, unidentified; identical to SEQ ID NO: 15548
  misc_feature 1..132: note = Synthetic
  source 1..132: mol_type = other DNA

SEQ ID NO: 15550 - DNA, 921 bp, unidentified
  source 1..921: mol_type = other DNA
  misc_feature 1..921: note = Synthetic
acggtttctcatacgcgccttttgatagccaccgccgtcatgtctccgaactcagaggccaccgggacggcctgggcgcccccacccccgcgaccctcgcgcggagtcattatgatttcctccgtctcgacgaacgacgtacgtcgctttttactttgtatgcgggtctacagcaccgtggccgtgcagggcacctgcaccttcttgctctgtctgggcctggtgctggcttttccgcatcttaaaggcaccgtctttctctgttgcaccggctttatgccgcccttgagtttgatggtgcccaccatctgtttggccctgctgcacggcaaacgcgatgaaggatcgttcacgtcgccgccgagcccgggcctgctcaccatttatagcgtgctcacgacgctttcggtgatcgtggccagcgcctgctcctcctctacgctggtgaccttctcgggcctcttggcttgcgtgctttttagcctctgcagctgcgtcacgggtctagccggccataatcaccgtcgatggcaggtcatcgtcacgctgtttgtgatcggcgttatcgcgttcttgatcgcactttacctgcagcccgtaccgttggggcacaaactttttttgggctattacgccatggcgctcagcttcatgctggtcgtcacggtctttgacaccacgcgcctgtttgagatcgcgtggtccgaggccgacctgctcaccttgtgtctctatgagaacctggtgtacctgtacctgctcattctcatccttttcaccaccgaggactcattagacaaactcatcgcttggatgacctggttatcgtcacgcgccaccggggccaccaacgcggcctccatttcgggctgtgaccttttgcgggaggtacagagaaacctcacgcgaaccatggcgtaa

SEQ ID NO: 15551 - DNA, 1290 bp, unidentified
  misc_feature 1..1290: note = Synthetic
  source 1..1290: mol_type = other DNA
atggctaacttcaatggtttcgaagcaagcagccttattgatcaaggcttagacgacatagaggcaatcggacagatgacctgcattagaccctctgaggagtcaccatacgtagagataccagacactggtatcgtacctgggatagtaggcaaagccattggtgaaattgagtccaaaaccaatggtgatggccatacctcagcacctacaccgcacaacaccatcaagggcaatgctgataaagtcaagaaatctggcgaaacgatcccggacaaagcggaggaacctcaaccggtgcaacagcaggataggagcaaagtcaaagaaagcaacattacaatgaatccagacagctcaggtttcaagcaactcttcaatagagacacggaactcaagacaaattcatggaaaaacaccatagctggttccatgatgaaccataaagatgagaacaagttaggaataaggggggggcttctagcgaagggagaagacccagccgaggtcatagaagggaaatcagtacctctaccattgacgggatatttgaggtctgggaattttgcaatcccatgtgttcccgtattacccccgatttcaagcccaaaatctgcgtctgcggagagtgtccgagatactgcccaagatgcaaggaacagggcggtatcagagtgcctgagtgagcaggttggcgagatatccatggcagtttcggatctaggtgtcattgttagaaaagtcataatgggcaattccgagagggacgaaaacttaacagcactaatgatgaagatgcaaaaacagcttgcaatccaggagggaaagctggaaactctgcaatccactgttgggaaaatctatgctaaagttgacctgatcaaggatcatgtctcgaagtacatgatattaacaagagaaggaggtaaagacagtcaagaacatgaacctaggagattgatacagtcttacacaggcccagggaaacccgaagccgtgatcaatgagcatggccaaatcaggctcaaaggaacgaccaggagtggcaccagttggaacacgaccccacatgatttggtggatcccacaagactgacgatgtccagagatgaatcaaatgctacaaggtttatacccaagcttgatgatgcttctagggcaactctcctcagcctcctaaccatgtccggcctggacaatgacactcaaagcacacttgaaggaataattatgagtgccacaagagtagatcagctaattgaggttcatgagatactcttggaaccataa

SEQ ID NO: 15552 - DNA, 684 bp, unidentified
  misc_feature 1..684: note = Synthetic
  source 1..684: mol_type = other DNA
atggctaacttcaatggtttcgaagcaagcagccttattgatcaaggcttagacgacatagaggcaatcggacagatgacctgcattagaccctctgaggagtcaccatacgtagagataccagacactggtatcgtacctgggatagtaggcaaagccattggtgaaattgagtccaaaaccaatggtgatggccatacctcagcacctacaccgcacaacaccatcaagggcaatgctgataaagtcaagaaatctggcgaaacgatcccggacaaagcggaggaacctcaaccggtgcaacagcaggataggagcaaagtcaaagaaagcaacattacaatgaatccagacagctcaggtttcaagcaactcttcaatagagacacggaactcaagacaaattcatggaaaaacaccatagctggttccatgatgaaccataaagatgagaacaagttaggaataaggggggcttctagcgaagggagaagacccagccgaggtcatagaagggaaatcagtacctctaccattgacgggatatttgaggtctgggaattttgcaatcccatgtgttcccgtattacccccgatttcaagcccaaaatctgcgtctgcggagagtgtccgagatactgcccaagatgcaaggaacagggcggtatcagagtgcctgagtga

SEQ ID NO: 15553 - DNA, 213 bp, unidentified; identical to SEQ ID NO: 15004
  misc_feature 1..213: note = Synthetic
  source 1..213: mol_type = other DNA

SEQ ID NO: 15554 - DNA, 540 bp, unidentified
  source 1..540: mol_type = other DNA
  misc_feature 1..540: note = Synthetic
atggatacaacgggagcttccgaaagcagtcaacccatccgagtgaatcttaaacctgacccgttggcgtcgtttacacaagttataccgccactggcgttggaaacaacgtggacatgccctgccaactcacatgcaccgacgccatcccctctgtacggtgttaagaggttatgtgctcttcgagcaacatgcggccgggctgatgatttacacgcttttttgattggacttggacgtcgagataaaccatctgaatccccaatgtatgttgacctacagccgttttgcagcctcctaaattcccaacgactgttaccggaaatggctaattataacaccctatgcgatgcacccttcagcgccgcaactcagcagatgatgctggagtccggacagctgggtgtacatctggcggctattgggtatcactgtcattgtaaatcccccttctcggcggagtgttggaccggtgcatccgaggcatacgatcatgttgtatgtgggggaaaagcccgagcggctgtcggcggactatga

SEQ ID NO: 15555 - DNA, 48 bp, unidentified; identical to SEQ ID NO: 8722
  source 1..48: mol_type = other DNA
  misc_feature 1..48: note = Synthetic

SEQ ID NO: 15556 - DNA, 48 bp, unidentified; identical to SEQ ID NO: 8722
  source 1..48: mol_type = other DNA
  misc_feature 1..48: note = Synthetic

SEQ ID NO: 15557 - DNA, 1530 bp, unidentified
  misc_feature 1..1530: note = Synthetic
  source 1..1530: mol_type = other DNA
atggcacttgaaccggtggctggggcttcaatagccgccccactcaccggccaaaacaatattatagacccctggattagattaaattttgtgcaggctcccaatggagagttcacggtttcaccccgcaactcgcccggggaagtcctattaaatttggaattaggccccgaactaaatccatacctagcacacctctctagaatgtataatggttatgcgggtggggttgaggtgcaagtactactggctgggaatgcgttcacagctggaaaactggtgtttgccgcagttccccctcattttccattagaaaatataagccctggccagataactatgttccctcatgtaattattgatgttaggactttagaaccagttttgttgccccttcctgatgttaggaataatttctttcattataatcagcagaatgaaccgaggatgagacttgtagcaatgctttatactcctcttagatctaatggttctggtgatgatgtattcactgtctcctgcagggtgcttacccgaccttcccctgattttgattttaattatttggtcccccctactgttgaatctaaaaccaaacccttcacactccctatcttgactataggggagttaaccaactccaggttccctgtacctatagatgagctctacaccagtcccaatgagagtctggtggtgcaaccccagaacgggagatgcgcactagatggggagctgcagggcacgactcagctcctccccacggcgatctgctcgttcaggggccggatcaatcagaaggtgagtggggaaaaccatgtttggaatatgcaggtcaccaacatcaacgggaccccttttgatccaacagaggatgtcccggctcctctaggcactccagatttctctggcaagctctttggtgtactaagccagagagaccatgataatgcctgcaggagtcatgatgcagtaattgcaaccaactctgccaaatttaccccaaaattgggcgctatacaaattggcacatgggaagaagacgatgtgcacatcaaccaacctactaagtttactccagttggcttgtttgaagatggaggtttcaaccagtggacactccccaattattctggagccttaacacttaatatgggattggcccctcctgtggcccccaccttccctggtgaacaaattcttttctttagatcccacattcctcttaaaggaggtgtggcggacccagttattgattgtctcttgcctcaagaatggatccaacatctttaccaagagtcggccccctcacaatcagatgtagcactgattaggtttacaaatccagacacaggacgtgttctatttgaagcaaaattacacaggagtggttacatcacagtggccaatactggtagcagaccgattgtggtaccagctaatggttacttcaggtttgactcttgggttaatcaattctattctcttgcccccatgggaactggaaatgggcgcagaagggtgcagtaa

SEQ ID NO: 15558 - DNA, 1530 bp, unidentified; identical to SEQ ID NO: 15557
  misc_feature 1..1530: note = Synthetic
  source 1..1530: mol_type = other DNA

SEQ ID NO: 15559 - DNA, 324 bp, unidentified
  misc_feature 1..324: note = Synthetic
  source 1..324: mol_type = other DNA
acggcaaccgcaccttcgcctccggccctccgccagcgcccttccgcgtccgcgatgacctcccggcccgccgaccaagactcggtgcgttccagcgcgtcggtgccgctttaccccgcggcctcgcccgtcccggcagaagcctactactcggaaagcgaagacgaggccgccaacgacttcctcgtgcgcatgggccgccagcagtcggtcctaaggcgccgacggcggcgcacgcggtgcgtcgggctggttatcgcctgtctcgtcgtggccctcctatctggagggttcggggcacttttggtgtggctgctccgctaa

SEQ ID NO: 15560 - DNA, 78 bp, unidentified
  misc_feature 1..78: note = Synthetic
  source 1..78: mol_type = other DNA
aagcctactactcggaaagcgaagacgaggccgccaacgacttcctcgtgcgcatgggccgccagcagtcggtcctaa

SEQ ID NO: 15561 - DNA, 6234 bp, unidentified
  source 1..6234: mol_type = other DNA
  misc_feature 1..6234: note = Synthetic
atgaaaatcattaccagtagcacaaaccaaaatgactctaaatacggaccgagagccggaaaacaatgcatgtcgaacagcttttcatttctccataccgtttacttaaacggaattaacaattctctcaatgcgggtactatagacgccataatggaagaaggctatcacttagacacggccggcaccttagccctaatgttaaataactcagattcgcaagactacagactccccaccgagatccccaagaggatccattctagatacggtgtcacacagcatgaactctcacggccatttaacggaaccctagacacacaaaaaattgacaatgaggtatatctcggactcatagatttcatactgtatggcaaaagcaagaatggtcctacttttgcagtcatcacgatcggcgtgctatcgcgagcacttttttttcttaacaatactctctacttattcgactctcaccctactgaacgagaagccacagcagccatctacatctgtcaaaacattgaagaagtttatgaactgctcaccacccacggcaccgaaggcttctactacgacgccagcctcatttttttcatagaaacctccaatttgtcgctctctagtcacgacgccgagcttctcatcctaaaaacttataaagaccccgacatagcgattgcgctagataaattttcttccacggaaatccatgagataaaaaaaacagatgatatcggatcgcaacaggacctcgttgcggataaaacgacagatctagaacacgcgccccataaaagaaagaaaaactctcatagtctagaactagaactaaatgacaaaaagaaaaaagataccgcatccttgacatattacgcaacagaagttgacctcattccgagtttttatgaactacgatcacaatttcaatctttatttcacgatctcaaatcttttcctataatgaaatctaatttcaactggaccatatacttacaagattctcctattaatcctaatcagcccttcgcaacaccctttctctggaacagagttttccacttattgtgtcaaattatcgacgtgtttgtaggcgtcggatccacaaatgacgattctagcaaacaacaacaacaaactattttcataaattatttattgcctttcaaggacttttccgaagtattcaacgaggcgttggcagcttgtcaagaaaacaatctggacatcatcttcatttacaataattacctgtgcaaaaccacgacctttcgaacactcgagagaatcttactaagtaaatttctggcaatagttgataatgatcacaaaaaacattatgaatgggtcaaatcgtggaccacgcaaatgttccaaggaatgccaaaaaaactagatgacatagaaaattatctaaaagcctacgtggaccataaccctgtgaaacactttcatgaattcatttgtctgaataaggcagaaaaatacaaagtagctgttctgctaaacgaaaaacgaaaagagattcaagaggctattgaacgagaaaagaacagtttcgcacaactctctaattttattgacaaacttggcgaaactcccgcacttcctatagaatcagaaaacgtgcacaaagttcacacgagcgacatcactgaaggcatcgttccgcgtttcataaccgaatcgattgaactaccaaacatctccacgctaaacaacacccaacaaatatccctagataaacaactcaatgaaaaactcaccaacaccattcacacgctcacaaacaaattcaccaaaatcgtacaagataactataacaatatcgctgccggtttcatgcccgttaccgaactgaattgcctatttgcctacctagtaaacctttattttaacattgaagttttaaaacacagtggcctaaacattaacactgtgttgcttcaagaggtggaaaaactgtatgacaacacgcaatttctacgcttcggaacttctcacttcaatataaacaacctttcaaactttaccctatctatcagaaaaatgttcgtagatttctataacagccagaaaccctcggacagagcttccgaaatcctagccgcaatcgaatccatcctagcggatcccagcaaaaacaagacagtcgtaaatatagaaatgatcaaatcgcaacttgaagaactggggaaaatggaaatctccaccaccgaaaacaaacagacagctgcaatcacaaaacaaatcctaggggaccaagagttaacccccatttacgatttcctgcaccacctctctgcttataacctacctaatactacaaccgtaaaaaatttacacctccatttcatcttagaacaacgaccagatatcgctatgactctacacgataaaatacaatccatacttgacatatatgtagacgacatgctcaatgacataacggtccctgaacagacgttttcaaccgttctatttcttgtagatctcttcccaaacagcaccgaaaaaacagcactgttcgaatccgttctcacgctacggcaattagcaaagaaatgcgctaacttaaaaactctagatgaattcgacgatctggcccaattcatcacgacgaatagcgaacaacttcaaaacatgatgagacagcattttggaaaaaaaataccaacgctgatgggacatatcaaatttctctactctcaaaaaataatcaccactgaagagaaaaactggatacagagagcaaaaacggtcgtcatcacatctcccgaagaactgacagccttcttagccactgcacccactaaacacgccttacaaacttgcaaacctgacctcgataaagcactacaacgacatatggaagagcaaatgaaacaaactgccgagaacgacaaaaaacacatactcacaatcagaagcaccctcgaaaaaagactgaccgacatcttacttattctaaaggatggtcaattttcgtctctggaaacaatgcatttgaatcttttagaaacctttctgaaacaactgcaagataacaatgtcatcattcactttacccatgcactactgccagtgttaaaagacatagaaacgaccatcagcaagatcatctccgacgttattgaaaagatattaatcaaaactcctctaaaccccgaacagatgtccaaggaagaacaaaaatatacccctttactcagtttcttatccaagttcaaaaaaacaacattctgcacagaagatgtaaaaacagaaatcgaacaagtacaaaagagtatcacgttcctcaagaaaattgctacctccaccaataaacatactagactcagccactccatctacggacaagaattaaacctctacgaagagcgcattacagagctgagaaaagagacgaacaaaatgaaagaacagctctccaaagaatacgcattagctgaaaaaaaaattcttctctcgtcacaagatgcaaaaactgacaaaatttatctagttctaaatacgcacacgctgaaagaaataaaaaacactcaattcaaagaaacagcattcgctaaagctctcacggtggaagtcaacaataaagaaaatcaactccaggaattgttaaaccactttaacgcacacctaaaggcgaaaatggatcagaaccatataacaaaactttcattcgatacgaaatggacagccttcgtttcagattccaggctctacatcccagacttcattaacatcaaactgcaagactttatttctgatccctttaaagttataagtcagctaatgaacaaagcaaccaacgagatgccttacattcaagcagagataactctcaaatggttaacaaaattaatacacgacatcaacaaattctgcctgtcagctataagcgaattcggtaaagaagcaatcccatttaattacgcagccctacgagatttggagtaccagatcaacaccaaatacgtagaaattgaaaacaaagtcatttgcaacgaaacggtcgaaaacacgaaaaacattccaaaactgactaagctcttgaagcagttagatcctaaacgcgttgccggtgggcaggaacagtatcaaactctcatgaacaagattctcacttccgaaacttctatgcaacagacctacgaaaaagaacaactcaaaaaagaatactttgagatcgtcaataatgtcgccagcttcaagttagcattcaactttcctcagcaactacaaaatgtggaacggctaatagagaagttcaaatcgctgcccaaaagccagccatttgaaaaatttccacaggaaaatgatctactttctgactcactcaacacagaaaattatattaacggtctgcgcgcactcctcaacttcataacggcagcgcaaaactacatccagaacacacttctgaaacagtgggcggtctttcagcaacaaaatttcatcccgattgattactcagtagcgaatgtcaaacctatttcggatttatatgcccgcctcaggattgaacgggaacgtcaagtgttctaccaagtaaactccgtctttggaactcacctaatcgttgacgatacaggagttccgctgcaattccataacatctttaacaacgccatagtaaagtttttctccctgaactacaagcagattaatgtaccagaagacaccccccgcttggtatctagccaatataaactcctgtccgtatgtaaatctttcataatgatactacaacagttctgggagaatataatcaccctggacctaggcccttacctcagagacggtacacaaaattttaaaagagaactcataccgatcgtgaacttgaaattatttatatactgcataacacaagcctggacagcctctgaagacagtactgtttccacagcgttcgaattacccatcaagcaattcacacttttgatactatgctcacatcctgaatacctctacggctgcctcagtcattccacagatctggttataaattcattagccaaaagcatagacaaaaacagtctctataacacattcgtcgttagccacaaccctcccgagaagcccatgcatttaatgagaaatatatgtatcgacacccagctatggcaacccgccaaacttatgaaagataccttccaacaaacattttttacacaactgtgccccaaaaacgaaaagttttttatctatctcactgcctttttaattctaccctacaaatttatgaactatatctggattcaatacaaaccggccatttttacccaaagatcttatcaaaacctaattaaggacttatgctccgaatacgtacaccaaaataagatcactacgtcctcggtaactccccacgaaccagacacaataaaatccggagaaaggattacctcaaaaatcaccgtacacaaagcacaaaacacaccgacactcactcgcctgcaggctcaggaatatgtcttcgactacattctttactccttcttgacagggtatgaaatgacattcgccatgtacatcgatatcatcgaaaaaacatacctgctttgcatgagacacctggaaaacgtactccacgataaagacttccaatctgtcctcagagcacgcacattcgacatcgactacatcctgaaacagtcatggactaaaaacatagtcgaacattcactcttttcagtacagctcgataaaatcgtctcctacctcaaccacacaaacagagcgacacccaatattcctttgatattatttaattatgacaacgaagttgtcaacgtttatctaccgccgatgtccaccaatccaaaaaaagtcgccttttacatcaaaaatcctttccactttcccgtgcaagaatacgaagcgacaaatttaatttccttccatctctacccaaaaacaacagatattttaaaccaacttccgcccaacaatactgagtctactcgcccgggtaaacaaacctctgaaactttaaccaacaaaaacctctccgaaccaaagtttaaaaagcctgccgttactggacttatgcccaagagccaatcgatcatcctatccactgataccaacgtaccggaaaccagtccagacgtaaaagctaacacggccagcgcagcaataaaagatgtcactctagctcgagaaaaaatcaacgagttctccgaatcgataaatacaactatttcaaaattaaaatctatgtatctgtaa

SEQ ID NO: 15562 - DNA, 78 bp, unidentified; identical to SEQ ID NO: 8733
  misc_feature 1..78: note = Synthetic
  source 1..78: mol_type = other DNA

SEQ ID NO: 15563 - DNA, 24 bp, unidentified
  source 1..24: mol_type = other DNA
  misc_feature 1..24: note = Synthetic
atgggaaataaaaaagaattataa

SEQ ID NO: 15564 - DNA, 366 bp, unidentified
  source 1..366: mol_type = other DNA
  misc_feature 1..366: note = Synthetic
attagctctttcaaggtatataaatcgctctcggaggtcatgatctcgctgtttttgctgatctgctatttcgttctcatttttaacatcctcgttcctcgcatattcgacaagctgcgccaggagggcgccgcgttcgaccgcctcgccggctccggcaacgtgtaccgctgcgtcggcgacgtggtggtgtcgtacgcgctgggggccaccgggatctctgcgcgcgtgatgacggacgagaagggcgcgccgctgccgtgtgcgcggatcgcggaggcggactccgcgcgcttcgcgcgctgcggcgcgcgcgcggatctgcgggacgtgtgcgcgaacgcgtacgccgacgtgtttttatga

SEQ ID NO: 15565 - DNA, 213 bp, unidentified; identical to SEQ ID NO: 15006
  misc_feature 1..213: note = Synthetic
  source 1..213: mol_type = other DNA

SEQ ID NO: 15566 - DNA, 168 bp, unidentified
  misc_feature 1..168: note = Synthetic
  source 1..168: mol_type = other DNA
aagtttcaattaaaattaaaaggaacaccagttcttcaattaaaggagagtcaaattaacgaactcgtaatatctctcctgtcgcagggtaagttacttatccgtgacaatgatacactcagtgtttctactgatgttcttgttaacacctacagaaagttacgttga

SEQ ID NO: 15567 - DNA, 168 bp, unidentified; identical to SEQ ID NO: 15566
  misc_feature 1..168: note = Synthetic
  source 1..168: mol_type = other DNA

SEQ ID NO: 15568 - DNA, 642 bp, unidentified
  source 1..642: mol_type = other DNA
  misc_feature 1..642: note = Synthetic
atggcgagcgccgcccttagcacgctctacggcgccttcgtcgcgcgctacctgcgcaagctcagcctctactccactaccaactctgtgacctgcgccatccacgtgggccgaatcgtcggcacgctgcagaactgtagcgtccgcatcctcaaccgctgcaataacaacgaccagcttagcttccgtctgctgctcgaagccttcgcagagaccgtcaacctgctgcctcccaagcagcgcgcggagatcgccgcgcaagtgggcgtcgacctggaagccgccagccacgaagagtcgcgcctggagcgcaaatgccgagcgcacgccgctctcgtgcaaagcatcgacgtgcagacgctcaacgtgggcacctgcatcgcgccgcccgggcgtagcctagccatacaggtcgtcaactcgggatccgcggccgccaactgcgggctagaagccatcatccgctcgctcagccagcggcctgcattcgttcccgtggacgcgcgccgcgcgctatgtcctggcgcgctcgcgcgcttgctagccgctgccgccgcggtgctgctggcgctactggcgctcgcggcactgcgccgccgcctgcgactgcgctaccagtacgccacggacctctacgtgtag

SEQ ID NO: 15569 - DNA, 210 bp, unidentified
  source 1..210: mol_type = other DNA
  misc_feature 1..210: note = Synthetic
aggcgcgagctgagcgacagagaacttatgcacagcttgcaaagagctctaacgggggccgggactgatggggagaactactttgacatgggagcggatttgcaatggcaacccagtcgcagggccatggaggctgcagggtgtgagcttccttacatagaagaggtggatgaagtcgaggacgaggagggcgagtacttggaagactga

SEQ ID NO: 15570 - DNA, 39 bp, unidentified; identical to SEQ ID NO: 8759
  source 1..39: mol_type = other DNA
  misc_feature 1..39: note = Synthetic

SEQ ID NO: 15571 - DNA, 39 bp, unidentified; identical to SEQ ID NO: 8759
  misc_feature 1..39: note = Synthetic
  source 1..39: mol_type = other DNA

SEQ ID NO: 15572 - DNA, 1197 bp, unidentified
  misc_feature 1..1197: note = Synthetic
  source 1..1197: mol_type = other DNA
atagtcattaacgagaaaaacatcgtaatggcattcaccggtgatgaactggcgcgcatgttgcagtttaaggataagatgatttcttcggcggggctcgctctgaaatttgagaaagttgtacaggaggctatggcttccggaatagttcttcaacatatcacttgtattaaagttcggatttgtgacaattccgatatcttgtctgaccgtcagctgagaagtttattaataaacgggttgtatccttttgagggtaggatgagtatgtttggtgtaacggaggaatgggaaggtgcgtctgcggctccggagagacaggttgtttttttgttatcgtcaactggtcaagtgcttggatatgaagatggtgtggtattttatttgtcacctacgttttcagatttttggacaactgccatggagttctcgtgtcagaacgcgatcttgagtaattttatcgcacagaagtcccgcgatgaatacattgatcaatttcaaaaatattttacgagaatgagacatactccaattttcttgacaggtgtattgcctagacggtttcagaaggtagagagcagtgcttgtgtggaagaagatgctcgtgcttccatgagaccaattcagtgtgactcttttggtgttaaggatacattttgtcggccgacggaagaattgctgcagccatctgcgaataaagatgttggtggcaaggtgtgtatgtctttatcgtgtcgagaagacaactccgctcgacattgcacaatctatggactgaccgaaactcgtggtataaaaattatgttctcgaggcatacacagacagaccggtctgaggtgatgtgtaacgctgccacccaaaccggagacgtggtggataattcttcagaaactctgtttctcggtaaaaatttggtccatcagtcaattttggaaacggaagtcaaaacgaccgcaaaaaatacttttgatgtctctaatcctcgaatcgattcggtgtacgatacgacagtgttcggtgctatggcaaccgatgatgtaggttgtgaaaatgttcagggcggtgcgtctttggcgcaagaaaaacctttaaaaggttattgtatcactgctactccatcagaatgcaaaccgaacattcattggcttaagagcccagaaaaaactgttcaggaatcggcagctgtgctgaggtag

SEQ ID NO: 15573 - DNA, 294 bp, unidentified; identical to SEQ ID NO: 10920
  misc_feature 1..294: note = Synthetic
  source 1..294: mol_type = other DNA

SEQ ID NO: 15574 - DNA, 450 bp, unidentified
  source 1..450: mol_type = other DNA
  misc_feature 1..450: note = Synthetic
atggacacagtcaacagaacacatcaatattcagaaaaggggaaatggacaacgaacacagagactggagcaccccaactcaatccgattgatggaccactacctgaggataatgagccgagtgggtatgcacaaacagattgtgtattggaagcaatggctttccttgaagaatcccacccagggatctttgaaaactcgtgtcttgaaacgatggaagttgttcagcaaacaagagtggataagctgacccaaggtcgccaaacctatgactggacattgaaaagaaaccagccggctgcaaccgctttggccaacactatagaggtcttcagatcgaatggtctaacagccaatgaatcgggaaggctaatagatttcctcaaagacgtgatggaatcaatggataagggagaaatggaaataataacacatttccagagaaagaga

SEQ ID NO: 15575 - DNA, 297 bp, unidentified
  source 1..297: mol_type = other DNA
  misc_feature 1..297: note = Synthetic
atactggagaccctccatacagccatggaacaggaacaggatacaccatggacacagtcaacagaacacataaatactcagaaaaaggaaagtggacaacgaacacagagactggagcaccccaactcaatccaattgatggaccattacctgaggacaacgagccgagtgggtatgcacaaacggattgtgtattggaagcaatggctttccttgaagaatctcacccagggatctttgaaaactcgtgtctcgaaacgatggaaattgttcagcaaacaagagtggataaactga

SEQ ID NO: 15576 - DNA, 450 bp, unidentified
  source 1..450: mol_type = other DNA
  misc_feature 1..450: note = Synthetic
atggacacagtcaacagaacacataaatactcagaaaaaggaaagtggacaacgaacacagagactggagcaccccaactcaatccaattgatggaccattacctgaggacaacgagccgagtgggtatgcacaaacggattgtgtattggaagcaatggctttccttgaagaatctcacccagggatctttgaaaactcgtgtctcgaaacgatggaaattgttcagcaaacaagagtggataaactgacccaaggccgccagacctatgactggacgttgaatagaaatcagccggctgctaccgcattggccaacactatagaggtattcagatcgaatggcctgacagccaatgaatcaggaaggttgatcgatttcctcaaggacgtgatggattcaatggataaggaagaaatggagattacaacacatttccagaggaagagg

SEQ ID NO: 15577 - DNA, 2124 bp, unidentified
  source 1..2124: mol_type = other DNA
  misc_feature 1..2124: note = Synthetic
ctgcgggcgagcatcgggtcatcgggcatatcggccttgaccgcgttgaacatgctgtatgcctcgcagcgcggccgtctgaccgagaacctaagaaacgccctgcagcaggatagcaccacgcaaggctgcctgggtgccgagaccccgagtattatgtacacgggggccaagtcagacaggtgggctcaccctctggtgggcacaattcacgccagtaatttatattgcccaatgcttcgagcatactgccgccactatggccccaggcccgtgtttgtagcttctgatgaatcattacccatgttcggtgcgagccccgcccttcacaccccagtccaggtccagatgtgcctactaccagagctacgcgacacgttacagcgcctgctgcccccacccaatcttgaagactccgaggccttgacggaattcaagaccagcgtgtcctctgcccgtgccatccttgaggaccccaactttttggagatgagagagtttgtcaccagcctggccagcttcctgagtggtcagtacaagcacaagcccgcccgcctagaagcattccagaaacaagtagtgttacattctttttattttctgatctcaatcaaatctttagagattacagacaccatgtttgacatctttcaaagtgctttcgggttggaagaaatgacgctggagaagctgcacatttttaagcaaaaagccagcgtgtttcttatccccaggcgccacggcaagacctggatagtcgtggccatcatcagcctcatcctctcgaatctctccaacgtgcaaataggctacgtggctcaccagaaacatgtcgcgtccgccgttttcactgaaattattgacaccttgaccaagagcttcgactccaagcgtgtagaggtcaacaaggagaccagcaccatcacgtttaggcacagtgggaaaatctccagcaccgtaatgtgtgccacctgcttcaataagaatagcatccgggggcagacatttcacctcttgtttgtggacgaggctaactttatcaagaaggaggccctgccggcgatcctgggctttatgcttcagaaggatgccaagattatcttcatctcgtctgtgaactcggctgaccaggccaccagctttctttataagctgaaggatgctcaggagcggctgctgaacgtggtaagttatgtgtgtcaggagcatcggcaagattttgacatgcaggacagcatggtctcatgcccctgctttcgcctgcacatcccgtcctacatcaccatggacagtaacatccgagcaaccaccaacctctttctggacggggcctttagcaccgagctgatgggtgacacctcctcgctgagccagggtagcctgagccgcactgtgcgtgacgatgccatcaaccagctggagctctgccgggttgacaccctcaacccccgagtagccggacgcctagcctcctccctctacgtgtacgttgatccggcctataccaacaacacatccgcatcaggcaccggaatcgccgccgtgactcacgacagggcggaccctaacagggtcatcgtcctgggcctggaacacttcttcctcaaggacctaacaggggacgctgccctccagatcgccacctgcgtcgtggccctcgtctcctcgatcgtcaccctgcacccccacttggaggaggtgaaggtagccgtggagggcaacagcagtcaggactctgcggtggccattgcctcaatcattggggaatcctgccccctcccctgcgccttcgtgcacaccaaggacaagacgtccagcctgcagtggcccatgtacctcctgactaatgagaagtcaaaggcctttgagaggctcatctacgcagtgaacacggccagcctttctgccagtcaggtcaccgtctccaacaccatccagctctccttcgatccggtcctctatctcatctcccagatcagggccatcaagcccatccctctccgcgacggtacctacacctacaccggcaagcagcgcaacctctctgacgacgtgctggttgcgctagtcatggctcattttctcgcaacaacacagaagcacacgttcaagaaagttcattaa

SEQ ID NO: 15578 - DNA, 2112 bp, unidentified
  misc_feature 1..2112: note = Synthetic
  source 1..2112: mol_type = other DNA
atcgggtcatcgggcatatcggccttgaccgcgttgaacatgctgtatgcctcgcagcgcggccgtctgaccgagaacctaagaaacgcccttcagcaggacagcaccacgcaaggctgcctgggtgccgagaccccgagtattatgtacacaggggccaagtcagacaggtgggctcaccctctggtgggcacaattcacgccagtaatttatattgcccaatgcttcgagcatactgccgccactatggccccaggcccgtgtttgtagcttctgatgaatcattacccatgttcggtgcgagccctgcccttcacaccccagtccaggtccagatgtgcctactaccagagctacgcgacacgttacagcgcctgctgccaccacccaatcttgaagactccgaggccttgacggaattcaagaccagcgtgtcctctgcccgtgccatccttgaggaccccaactttttggagatgagagagtttgtcaccagcctggccagcttcctgagtggtcagtacaagcacaagcccgcccgcctagaagcattccagaaacaagtagtgttacattctttttattttctgatctcaatcaaatctttagagattacagacaccatgtttgacatctttcaaagtgctttcggattggaagaaatgacgctggagaagctgcacatttttaagcaaaaagccagcgtgtttcttatccccaggcgccacggcaagacctggatagtcgtggccatcatcagcctcatcctctcgaatctctccaacgtgcaaataggctacgtggctcaccagaaacatgtcgcgtccgccgttttcactgaaattattgacaccttgaccaagagcttcgactccaagcgtgtagaggtcaacaaggagaccagcaccatcacgtttaggcacagtgggaaaatctccagcaccgtaatgtgtgccacctgcttcaataagaatagcatccgggggcagacatttcacctcttgtttgtggacgaggctaactttatcaagaaggaggccctgccggcgatcctgggctttatgcttcagaaggatgccaagattatcttcatctcgtctgtgaactcggctgaccaggccaccagctttctttataagctgaaggatgctcaggagcggctgctgaacgtggtaagttatgtgtgtcaggagcatcggcaagattttgacatgcaggacagcatggtctcatgcccctgctttcgcctgcacatcccgtcctacatcaccatggacagcaacatccgagcaaccaccaacctctttctggacggggcctttagcaccgagctgatgggtgacacctcctcgctgagccagggtagcctgagccgcactgtgcgtgacgatgccatcaaccagctggagctctgccgggttgacaccctcaacccccgagtagccggacgcctagcctcctccctctacgtgtacgttgatccggcctataccaacaacacatccgcatcaggcaccggaatcgccgccgtgactcacgacagggcggaccctaacagggtcatcgtcctgggcctggaacacttcttcctcaaggacctaacaggggacgctgccctccagatcgccacctgcgtcgtggccctcgtctcctcgatcgtcaccctgcacccccacttggaggaggtgaaggtagccgtggagggcaacagcagtcaggactctgcggtggccattgcctcaatcattggggaatcctgccccctcccctgcgccttcgtgcacaccaaggacaagacgtccagcctgcagtggcccatgtacctcctgactaatgagaagtccaaggcctttgagaggctcatctacgcagtgaacacggccagcctttctgccagtcaggtcaccgtctccaacaccatccagctctccttcgatccggtcctctatctcatctcccagatcagggccatcaagcccatccctctccgcgacggtacctacacctacaccggcaagcagcgcaacctctctgacgacgtgctggttgcgctagtcatggctcattttctcgcaacaacacagaagcacacgttcaagaaagttcattaa

SEQ ID NO: 15579 - DNA, 96 bp, unidentified; identical to SEQ ID NO: 8774
  source 1..96: mol_type = other DNA
  misc_feature 1..96: note = Synthetic

SEQ ID NO: 15580 - DNA, 96 bp, unidentified; identical to SEQ ID NO: 8775
  misc_feature 1..96: note = Synthetic
  source 1..96: mol_type = other DNA

SEQ ID NO: 15581 - DNA, 96 bp, unidentified; identical to SEQ ID NO: 8776
  misc_feature 1..96: note = Synthetic
  source 1..96: mol_type = other DNA

SEQ ID NO: 15582 - DNA, 192 bp, unidentified
  source 1..192: mol_type = other DNA
  misc_feature 1..192: note = Synthetic
acggtcaccttcatgagtcagtgcttcgccggtcgctgtggggccaatcaaccgaccgcccatttctccatcagcgtgcccgcctccagaatcataaatagggctgaggccagtcaagacagcactacatcccagctagcccgtcgtagagacagacaagatggttccttctcagagactctcccgaactag

SEQ ID NO: 15583 - DNA, 192 bp, unidentified; identical to SEQ ID NO: 15582
  misc_feature 1..192: note = Synthetic
  source 1..192: mol_type = other DNA

SEQ ID NO: 15584 - DNA, 192 bp, unidentified; identical to SEQ ID NO: 15582
  source 1..192: mol_type = other DNA
  misc_feature 1..192: note = Synthetic

SEQ ID NO: 15585 - DNA, 2187 bp, unidentified
  source 1..2187: mol_type = other DNA
  misc_feature 1..2187: note = Synthetic
ctgcgggcgagcatcgggtcatcgggcatatcggccttgaccgcgttgaacatgctgtatgcctcgcagcgcggccgtctgaccgagaacctaagaaacgcccttcagcaggacagcaccacgcaaggctgcctgggtgccgagaccccgagtattatgtacacgggggccaagtcagacaggtgggctcaccctctggtgggcacaattcacgccagtaatttatattgcccaatgcttcgagcatactgccgccactatggccccaggcccgtgtttgtagcttctgatgaatcattacccatgttcggtgcgagccccgcccttcacaccccagtccaggtccagatgtgcctactaccagagctacgcgacacgttactgcgcctgctgcccccacccaatcttgaagactccgaggccttgacggaattcaagaccagcgtgtcctctgcccgtgccatccttgaggaccccaactttttggagatgagagagtttgtcaccagcctggccagcttcctgagtggtcagtacaagcacaagcccgcccgcctagaagcattccagaaacaagtagtgttacattctttttattttctgatctcaatcaaatctttagagattacagacaccatgtttgacatctttcaaagtgctttcgggttggaagaaatgacgctggagaagctgcacatttttaagcaaaaagccagcgtgtttcttatccccaggcgccacggcaagacctggatagtcgtggccatcatcagcctcatcctctcgaatctctccaacgtgcaaataggctacgtggctcaccagaaacatgtcgcgtccgccgttttcactgaaattattgacaccttgaccaagagcttcgactccaagcgtgtagaggtcaacaaggagaccagcaccatcacgtttaggcacagtgggaaaatctccagcaccgtaatgtgtgccacctgcttcaataagaatgtaagacctgacgtttcagtacttggcaattgtagagcactcgcttcttatcctgtctttcagagcatccgggggcagacatttcacctcttgtttgtggacgaggctaactttatcaagaaggaggccctgccggcgatcctgggctttatgcttcagaaggatgccaagattatcttcatctcgtctgtgaactcggctgaccaggccaccagctttctttataagctgaaggatgctcaggagcggctgctgaacgtggtaagttatgtgtgtcaggagcatcggcaagattttgacatgcaggacagcatggtctcatgcccctgctttcgcctgcacatcccgtcctacatcaccatggacagcaacatccgagcaaccaccaacctctttctggacggggcctttagcaccgagctgatgggtgacacctcctcgctgagccagggtagcctgagccgcactgtgcgtgacgatgccatcaaccagctggagctctgccgggttgacaccctcaacccccgagtagccggacgcctagcctcctccctctacgtgtacgttgatccggcctataccaacaacacatctgcatcaggcaccggaatcgccgccgtgactcacgacagggcggaccctaacagggtcatcgtcctgggcctggaacacttcttcctcaaggacctaacaggggacgctgccctccagatcgccacctgcgtcgtggccctcgtctcctcgatcgtcaccctgcacccccacttggaggaggtgaaggtagccgtggagggcaacagcagtcaggactctgcggtggccattgcctcaatcattggggaatcctgccccctcccctgcgccttcgtgcacaccaaggacaagacgtccagcctgcagtggcccatgtacctcctgactaatgagaagtccaaggcctttgagaggctcatctacgcagtgaacacggccagcctttctgccagtcaggtcaccgtctccaacaccatccagctctccttcgatccggtcctctatctcatctcccagatcagggccatcaagcccatccctctccgcgacgggacctacacctacaccggcaagcagcgcaacctctctgacgacgtgttggttgcgctagtcatggctcattttctcgcaacaacacagaagcacacgttcaagaaagttcattaa

SEQ ID NO: 15586 - DNA, 459 bp, unidentified
  misc_feature 1..459: note = Synthetic
  source 1..459: mol_type = other DNA
ataggtaataaaaaggcgctcagtgcgaggatgcgaaccgattgggaaaaagtggatctcctgccaccagttggaagaatggctgttgatgtgatgaaagtagaaatctcgtcggcggacagagcattcatgctgatgtttgtaaaagcgtgcgcagtgttcgcatcgttgcacgggctgtatctgttgaatgaggtgtacctggcggcctcgcaccagaaagcagatgggaaaatcaataccacttggcagctgccgttcgtcctcttcctcttctgctgcattgccactaccgtttggatcctcgaaagcgagaacggagagggtgacggtgcccctcgacctgcatgtccagatttcagcacgagaggggcggaaacgggaaatcagggcgtacagcctggagctgtccatggtatcagtcagagagaaaagcatgaactccgcgcaaggagctaa

SEQ ID NO: 15587 - DNA, 42 bp, unidentified
  source 1..42: mol_type = other DNA
  misc_feature 1..42: note = Synthetic
atgattgcgatggtctcagttgagcattcaccttttaaataa

SEQ ID NO: 15588 - DNA, 42 bp, unidentified; identical to SEQ ID NO: 15587
  misc_feature 1..42: note = Synthetic
  source 1..42: mol_type = other DNA

SEQ ID NO: 15589 - DNA, 42 bp, unidentified; identical to SEQ ID NO: 15587
  source 1..42: mol_type = other DNA
  misc_feature 1..42: note = Synthetic

SEQ ID NO: 15590 - DNA, 216 bp, unidentified
  misc_feature 1..216: note = Synthetic
  source 1..216: mol_type = other DNA
aagaagtggcgctgcgtgctcttcaagggcgcggcggtggcggcctcggagttcgggttccgctcgcacgacggcgtctcacccgcgcgcttcgcgagcgtggaggcgtgcgcggacgagatcttcacggccgcgagcgacttccgcgtgttcaacccgtgtttgccgccgaatcagggcagcgaggcctgcctttttctaaaatcaatactttaa

SEQ ID NO: 15591 - DNA, 51 bp, unidentified; identical to SEQ ID NO: 8790
  misc_feature 1..51: note = Synthetic
  source 1..51: mol_type = other DNA

SEQ ID NO: 15592 - DNA, 51 bp, unidentified; identical to SEQ ID NO: 8790
  source 1..51: mol_type = other DNA
  misc_feature 1..51: note = Synthetic

SEQ ID NO: 15593 - DNA, 1590 bp, unidentified
  source 1..1590: mol_type = other DNA
  misc_feature 1..1590: note = Synthetic
atgatggcgtctaaggacgctacatcaagcgtggatggcgctagtggcgctggtcagttggtaccggaggttaatgcttctgaccctcttgcaatggatcctgtagcaggttcttcgacagcagtcgcgactgctggacaagttaatcctattgatccctggataattaataattttgtgcaagccccccaaggtgaatttactatttccccaaataatacccccggtgatgttttgtttgatttgagtttgggtccccatcttaatcctttcttgctccatctatcacaaatgtataatggttgggttggtaacatgagagtcaggattatgctagctggtaatgcctttactgcggggaagataatagtttcctgcataccccctggttttggttcacataatcttactatagcacaagcaactctctttccacatgtgattgctgatgttaggactctagaccccattgaggtgcctttggaagatgttaggaatgttctctttcataataatgatagaaatcaacaaaccatgcgccttgtgtgcatgctgtacacccccctccgcactggtggtggtactggtgattcttttgtagttgcagggcgagttatgacttgccccagtcctgattttaatttcttgtttttagtccctcctacggtggagcagaaaaccaggcccttcacactcccaaatctgccattgagttctctgtctaactcacgtgcccctctcccaatcagtagtatgggcatttccccagacaatgtccagagtgtgcagttccaaaatggtcggtgtactctggatggccgcctggttggcaccaccccagtttcattgtcacatgttgccaagataagagggacctccaatggcactgtaatcaaccttactgaattggatggcacaccctttcacccttttgagggccctgcccccattgggtttccagacctcggtggttgtgattggcatatcaatatgacacagtttggccattctagccagacccagtatgatgtagacaccacccctgacacttttgtcccccatcttggttcaattcaggcaaatggcattggcagtggtaattatgttggtgttcttagctggatttcccccccatcacacccgtctggctcccaagttgacctttggaagatccccaattatgggtcaagtattacggaggcaacacatctagccccttctgtatacccccctggtttcggagaggtattggtctttttcatgtcaaaaatgccaggtcctggtgcttataatttgccctgtctattaccacaagagtacatttcacatcttgctagtgaacaagcccctactgtaggtgaggctgccctgctccactatgttgaccctgataccggtcggaatcttggggaattcaaagcataccctgatggtttcctcacttgtgtccccaatggggctagctcgggtccacaacagctgccgatcaatggggtctttgtctttgtttcatgggtgtccagattttatcaattaaagcctgtgggaactgccagctcggcaagaggtaggcttggtctgcgccgataa

SEQ ID NO: 15594 - DNA, 1590 bp, unidentified; identical to SEQ ID NO: 15593
  misc_feature 1..1590: note = Synthetic
  source 1..1590: mol_type = other DNA

SEQ ID NO: 15595 - DNA, 135 bp, unidentified
  misc_feature 1..135: note = Synthetic
  source 1..135: mol_type = other DNA
acgccagagaaggcagtgtccgtttcgaagcgctactgggcgtatataccaatgtggtggagtttgttaagtttctggagaccgccctcgccgccgcttgcgtcaataccgagttcaaggacctgcggagaatga

SEQ ID NO: 15596 - DNA, 135 bp, unidentified; identical to SEQ ID NO: 15595
  source 1..135: mol_type = other DNA
  misc_feature 1..135: note = Synthetic

SEQ ID NO: 15597 - DNA, 411 bp, unidentified
  misc_feature 1..411: note = Synthetic
  source 1..411: mol_type = other DNA
aggctttcatgcgcgataaatcggatggcggcgccgacgacgcccgtggtgcaccttacgccggtgttcgtggagcctacaatcgcacactcgctgctgcgcgcagagtcctacctcgcgatcgcggttcttgagctcgtgctcgcactcgcgcttgcgctcgtcttcttccgcgacgagctgggcgcgctattccgccgcgcgccgcgagcgccttcgccgctggacgcgtacctgcaggcgagcctcgtctgcgacggcgacgcgctactgatcgagctgcccgagggccgggtgccggcgctcgcgctggacgggcggcccgtcgcgttcccggggtgcgagagccttttgtaccgcataaatggaccacgaaaagtacgtcttgtcgatgttcttggaggaagataa

SEQ ID NO: 15598 - DNA, 1215 bp, unidentified
  source 1..1215: mol_type = other DNA
  misc_feature 1..1215: note = Synthetic
attatttatttacaaagaaaggtcgggacaagtatctcaatggggtccaaactatatatggttcagggcaccagtgcatatcaaactgcagtggggttctggctggacatcgggaggaggtacatattggctatagtcctatcagctttcgggctgacctgcacagtcactattgcactcactgttagcgtcatagttgaacagtcagtgttagaggagtgcagaaactacaatggaggagatagagattggtggtcaaccacccaggagcagccaactactgcaccaagtgcgactccagcaggaaattatggaggattacaaacggctcgaacaagaaagtctgaaagctgtttgcatgtgcaaatttcttatggtgatatgtatagccgcagtgatactgtactgggtggttttgattgtatgggcttattggttctttgcaaatcaggaccaatttgtcagcgagataatcaagttgacccaacagccctctgccactgcagggtagatctttcaagtgtggactgctgcaaggtgaacaagattagcactaacagcagcaccacctctgagccccagaagaccaacccggcatggcctagccaagacaacacagactccgatccaaatcctcaaggcataaccaccagcacagccactctgctctcaacaagcctgggcctcatgctcacatcgaagactgggacacacaaatcagggcccccccaagccttgccggggagcaacaccaacggaaaaacaaccacagaccgagaactagggtccacaaaccaaccaaattcaaccactaatgggcaacataataaacacacccaacgaatgacactcccgccaagttacgacaacacaagaactatcctccagcacacaacaccctgggaaaagacattcagtacatacaagcccacacactctccgaccaacgaatcagatcaatccctccccacaactcaaaacagcatcaactgtgaacattttgacccccaaggcaaggaaaaaatctgctacagagtaggttcttacaactccaatattacaaagcaatgcagaattgatgtgcctttgtgttccacttataacacagtgtgcatgaaaacatactataccgaaccattctactgttggaggcgtatctggcgttgcttgtgtgatgacggagttggtctggttgagtggtgttgcactagttaa

SEQ ID NO: 15599 - DNA, 837 bp, unidentified
  misc_feature 1..837: note = Synthetic
  source 1..837: mol_type = other DNA
atgtgccgccgcccggattgcggcttctctttctcacctggaccggtgatactgctgtggtgttgccttctgctgcccattgtttcctcagccgccgtcagcgtcgctcctaccgccgccgagaaagtccccgcggagtgccccgaactaacgcgccgatgcttgttgggtgaggtgtttgagggtgacaagtatgaaagttggctgcgcccgttggtgaatgttaccgggcgcgatggcccgctatcgcaacttatccgttaccgtcccgttacgccggaggccgccaactccgtgctgttggacgaggctttcctggacactctggccctgctgtacaacaatccggatcaattgcgggccctgctgacgctgttgagctcggacacagcgccgcgctggatgacggtgatgcgcggctacagcgagtgcggcgatggctcgccggccgtgtacacgtgcgtggacgacctgtgccgcggctacgacctcacgcgactgtcatacgggcgcagcatcttcacggaacacgtgttaggcttcgagctggtgccaccgtctctctttaacgtggtggtggccatacgcaacgaagccacgcgtaccaaccgcgccgtgcgtctgcccgtgagcaccgctgccgcgcccgagggcatcacgctcttttacggcctgtacaacgcagtgaaggaattctgcctgcgtcaccagctggacccgccgctgctacgccacctagataaatactacgccggactgccgcccgagctgaagcagacgcgcgtcaacctgccggctcactcgcgctatggccctcaagcagtggatgctcgctaa

SEQ ID NO: 15600 - DNA, 180 bp, unidentified
  source 1..180: mol_type = other DNA
  misc_feature 1..180: note = Synthetic
ttgaaactcgagatcgagaacgcgctcgagtctcgcctcatcgacaccttcaccgcccgacctctcctggtagaaatccaacgggggatcactaccatcaccctgttctgcatctgccccacgcccggattacatgaagatctgtgttgtcatctttgcgctcagtttaataaaaactga

SEQ ID NO: 15601 - DNA, 174 bp, unidentified
  misc_feature 1..174: note = Synthetic
  source 1..174: mol_type = other DNA
attaccatcgaagggggaatagactctcgcctgcatcgcatcttctcccagcggcccgtgctaattgaacgcgaccagggaaatacaaccatctccatctactgcatctgtaaccaccccggattgcatgaaagcctttgctgtcttgtttgtgctgagtttaataaaaactga

SEQ ID NO: 15602 - DNA, 36 bp, unidentified; identical to SEQ ID NO: 8803
  misc_feature 1..36: note = Synthetic
  source 1..36: mol_type = other DNA

SEQ ID NO: 15603 - DNA, 9021 bp, unidentified
  misc_feature 1..9021: note = Synthetic
  misc_feature 3093: note = n is a, c, g, or t
  source 1..9021: mol_type = other DNA
acgaatcctaaacctcaaagaaaaaccaaacgtaacaccaaccgccgcccaatggacgttaagttcccgggtggtggccagatcgttggcggagtttacttgttgccgcgcaggggccccagattgggtgtgcgcgcgactcggaagacttcggagcggtcgcaacctcgtggaagacgccaacctatccccaaggcgcgtcgacccgagggaaggtcctgggcacaaccaggatatccatggcctctttacggtaatgagggttgtgggtgggcaggatggctcttgtccccccgtggctctcgaccgtcttggggcccaaatgatccccgcgggaggtcccgcaatttgggtaaggtcatcgataccctaacctgcggcttcgccgacctcatgggatacatcccgctcgtaggcgcccccgtgggtagcgtcgccagggccctggcacatggtgtcagggctttggaggacgggatcaattatgcaacagggaatctccccggttgctccttttctatcttcctcttggcacttctttcgtgcctgactgtccccgcttcggccgttaactatcgcaatgtctcaggcatctaccatgtcaccaatgactgcccgaattcaagcatagtgtatgaggccgaccatcacatcatgcaccttccaggttgcgtgccctgcgtgagagaggggaatcagtcacgctgctgggtggcccttactcctaccgtcgcagcgccatacatcggcgcaccgcttgagtccttacggagtcatgtggatttgatggtgggggccgccactgtctgctcgggtctttacatcggggacctgtgtggcggcttgttcctagttggccagatgttttcattccgaccacggcgccactggaccacccaggattgcaattgttccatctacacagggcacattacaggccacagaatggcctgggacatgatgatgaactggagtccaacaaccaccttagttctcgcccaggtcatgaggatcccaaccactctggtagacttactctctggaggccactggggtgtcctcgtgggggtggcctatttcagcatgcaggccaattgggccaaagtcatcttggtcctattcctctttgcaggggttgatgccgagactcacgtgtctggggcagcagtcggccggagtaccgccggcttggctaacctcttttcttctgggtctaagcagaatttacagctcatcaacagcaatgggagctggcatataaataggactgcccttaactgcaatgacagcttaaacactgggttcttggctagcttgttctacacccacaagtttaacagctcagggtgttccgaacggctcgcgtgctgcaagagccttgacagctacggccaaggctggggcccactcggggtcgctaacatcagcggctcgtctgatgacaggccttattgctggcactacgcgcctcggccatgcgggattgtgccagcatccagtgtgtgtggccccgtgtattgtttcactcccagccctgtcgtggtcggtactactgatcacgtcggggtccctacttacacctggggggagaacgagactgatgtcttccttttgaactcgaccagaccgccgcatggtgcgtggtttggatgcgtgtggatgaacagtaccgggttcaccaaaacctgtggcgcccctccatgcgaggttaacaccaataatgggacctggcactgccccaccgattgcttcaggaagcatccggagactacctacgccaagtgcggatcagggccttggatcacaccacgctgcctgattgattacccgtaccggctgtggcatttcccgtgcaccgccaacttctccgtctttaacatcaggacatttgtcggcggtatagagcatcggatgcaagcggcatgcaactggaccaggggggaagtctgtggcttggagcacagggatcgggtagagctatcacccctgctccttaccactacagcgtggcagatcctcccctgctctttcaccactttacctgccctctccaccggcttgatccacctccaccaaaatatcgtggacgtccagtacctctatggtgttggatctgcagtggtatcttgggcccttaagtgggaatatgtggtgctcgcgttcctgcttctcgcggacgcgagagtctctgcctacctatggatgatgtttatggtaagtcaagttgaggcggctctgtccaacctaattaacatcaatgctgcttcagccgctggtgcccaaggcttctggtacgccatcctcttcatctgcattgtctggcatgtcaagggccggttcccagctgctgctgcctacgcagcctgcgggctgtggccctgttttctcctgcttctgatgctgcctgagagggcttatgcatacgaccaggaagtggcagggtcccttggcggcgccatcgttgtcatgctgaccattctgacactgtctccgcactacaagttatggctggctaggggattgtggtggatccaatattttatagctaggaccgaggctgtgctgcatgtctatattccatccttcaacgtgcgcgggcctcgcgactcagtgattgttcttgcagtcctggtctgtccagacctagtatttgacatcacaaaatatcttctggccatcttagggcccctccacatactccaggcctcgctcctacgcatcccttactttgtgagggcacaagcgctggttaagatctgcagcttgttgcgtggggtagtttatggcaagtacttccaaatggtcgtgcttaaaagcaggggcctgactggtacttacatctatgaccaccttactcccatgtcagattggccgccttacggcctccgcgatttggcggtggccctagagccagttgtgttcacgcccatggagaagaaagtcatcgtctggggcgctgacaccgctgcgtgcggagacatcataaggggattacctgtttcggccaggttgggcaatgagatcttgctcggaccagccgatacagaaacatcaaaggggtggagactccttgcccccatcacagcatacgcncagcagacccgcggcttgttcagcaccatcgtaacgagcctcactggcagggacaccaatgagaattgtggcgaagtgcaggtcttatccaccgctacgcagtccttcctgggtactgcggttaacggcgtgatgtggaccgtctaccacggggcgggtgccaagaccatcagcggcccgaagggacctgtcaatcaaatgtacactaatgttgaccaagacttggtggggtggccagcaccccccggagtcagatctcttgctccgtgcacctgcggctcggcagacttgtatctagtcaccaggcacgcggatgtaatacccgtgcgcaggagaggagacaccagaggagctctcttgagccctagaccaatatccattcttaagggatcttccggaggtccgctgctgtgccccatgggacaccgcgccggcatattccgtgcggcggtgtgtactcggggggtagccaaggcggtagacttcgtcccggttgaatctcttgagactaccatgagatcaccagtgttcactgacaactcaacacccccagcagtgccccagacctaccaggtcgcgcacctacacgcaccaacaggaagtggcaagagcactaaggtcccggcggcgcatgctgcccaaggctataaagtgctagtgctcaatccttcggttgcggccacactgggttttggggtatacatgtccaaggcatatggcatcgacccgaacatccggtcgggagtcaggaccatcaccacgggtgcgccaatcacgtactcaacgtatggtaagttcctggctgatggaggttgcagcggaggggcatacgacataatcatctgtgacgagtgctattccactgactccacaacgatccttggcataggcacagtcctggaccaagcggagaccgctggagtgcgcctcaccgtgctcgcgactgctactccgccagggtcagtgactacacctcattccaacatagaggaggtcgccctgccaacaacgggggaaatacccttttacggcaaggcgatccctctggagctgatcaaggggggcagacatctcatcttctgccattcaaagaaaaagtgcgatgaactggccagacaactgacatctcttggtctgaatgccgtagcctactacagaggcttagacgtttcggtgattcccacgtctggggacgtcgtggtatgcgccacggacgccctcatgacgggtttcaccggcgactttgactcagtgatagactgcaatacatctgtgatacagactgttgacttcagcttggaccccaccttctccatagagattacaaccgttccccaggacgcggtatcccgcagccagcggagaggccgcactggtagggggaggttgggcacataccggtatgtcaccccgggagagagaccatcaggcatgtttgacactgcagagctttgcgagtgctacgatgccgggtgcgcctggtacgagctgacacctgctgaaaccacaacaaggctgaaagcttacttcgacacaccaggccttcctgtgtgccaagaccatctggaattctgggagagcgtctttacagggttaacccacatagacggtcatttcctatcccagaccaagcaatcgggtgagaatttcccgtatcttgttgcttaccaagcgacggtgtcggccaaggtctggctcgctccaccaagctgggacaccatgtggaagtgcctaattcgccttaagcccaccctgcacgggcccacgcccctcctctacagactggggtctgtgcagaatgaagtggtgctcacccatcccatcaccaaatacatcatggcttgcatgtcagctgatctcgaggtagtgacaagtacgtgggtcttggtgggcggcgtcctggcagctctggctgcttactgtctttcagtgggcagcgtagtgattgttgggagagtcgtcctgtcgggccaacctgctgtcattcctgatcgcgaagtgctctaccaacagttcgacgaaatggaggagtgttccaaacacctcccactagtcgagcacgggttacaactggctgagcagttcaagcagaaggccttaggtctcctaaatttcgctggcaagcaagcccaagaggcaacaccagtgatccagtctaacttcgctaaacttgagcagttttgggcgaacgacatgtggaatttcatcagcggcattcaatatctcgctggactgtctactttgccaggcaatcctgccattgcttccctcatgtcctttactgctgccgttacaagccctctgaccacccaacaaaccctcctttttaacatcttggggggatgggtggcctcacagattcgcgactccgatgcttctaccgcattcgtcgtgagcggcttggcgggggcggcagttggcagtgtgggccttggcaaaattttggtggacattctgcccggttacggcgccggcgtacgtggcgctgtggttaccttcaagatcatgagcggcgagatgccttccacagaggacttggtaaatttgctcccggccattctatcgcccggagcattggtggtggaggtggtatgcccggcgattttgcgccgccacgtgggcccgggcgaaggggccgtgcagtggatgaaccgtctaattgcgttcgcatcgcgaggcaatcacgtgtctcccacgcattacgtccctgagtccgacgcggcacgccgcgtgaccaccatactatcatccctcactgtgacatcccttctcagacgcctccacaagtggatcaatgaagattgctccaccccatgtgccgaatcttggctatgggaggtatgggattgggtcttgcacgtgctgagtgacttcaagacgtgcttaaaagcaaagttcgtgcccttaatgccaggcatccccctcctctcatggccaagaggctataagggagagtggcgcggagatggcgtgatgcatacgacatgcccctgcggagcagatctggcaggtcacatcaagaacggctcgatgagaatcaccgggccgaaaacctgcagcaacacatggcatggaaccttccccatcaatgcctacaccacaggccctggtgtacccatcccggctccgaactacaagttcgcgctttggagggtgtccgccgaggactacgtggaggttcgcagagtgggtgatttccattatgtcaccggggtaacacaagacaacatcaagttcccctgccaagttccggccccagagctcttcacggaagtggacggcatcaggatacaccgccacgcccctaagtgcaaacccttgctgcgggacgaagtgtcgttctcagtaggactcaattcgttcgtagtgggatcacaactcccatgcgagccagagccggacgtggcagtgctaacatccatgctgacagacccatcacacataacggcggaatcggcgcgtcggagattggctcgagggtcacgaccctcgctagctagttcctcggcgagtcagctttcgccccgtcttcttcaggccacgtgtaccgctccccatgactcccctggtactgatctcctcgaggctaacctcttgtgggggtctaccgctaccagggttgagacggacgagaaggtaataatactagactcttttgagtcatgtgtggctgagcaaaatgatgacagggaagtctcggttgccgcggaaatcctgcgtccgaccaagaagttccctccagcactaccgatctgggcccggccggactacaatccacctcttaccgagacgtggaagcagcaggactaccaagctccgaccgtccacggttgcgctctgcctccggcaaagcagccccctgttccctctcccaggaggaaacggacggtacagctcactgagtccgttgtttctaccgctttggcagagctggccgcaaagacctttggccagtcagagccgagctcagaccgtgatacagaccttaccaccccaactgagaccacagactcgggccccatcgtcgtggatgatgcatccgatgacggatcttattcgtcaatgcctccactagagggggagcccggtgacccggacttgacatcagactcttggtccactgttagcggatcggaggacgtcgtgtgctgttcgatgtcatactcgtggactggggcgcttgtaacaccttgcgcggctgaagaatcaaagctgccaattagccccctgagcaattcacttttgcgccatcacaatatggtgtatgccacgaccacccgttctgctgtgacacggcagaagaaggtgaccttcgaccgcctgcaggtggtggacagtacctacaatgaagtgcttaaggagataaaggcacgagcatccagagtgaagccacgcttgcttaccacagaggaagcttgcgacctgacgcccccccactcagccagatcaaagttcggctacgggaaaaaggatgttcggagccattcccgcaaggccattaaccacatcagctccgtgtggaaggacttgctggacgacaacaataccccaattccaacaacaatcatggccaaaaatgaggtcttcgctgtgaacccagcgaagggaggtcggaagcctgctcgcctgatcgtgtatccggatctcggatcccgggtttgcgagaagagagcgcttcacgacgtcatcaaaaaaactgccttagccgtgatgggagccgcttatggcttccaatactccccagcgcagcgggtggaatttcttctgactgcttggaagtcgaagaacgacccaatggggttctcttatgatacccgctgctttgactccactgtaaccgaaaaggacatcagggtcgaggaagaggtctatcagtgttgtgacctggagcccgaagcccgcaaagtcatcaccgccctcacagatagactctatgtgggcggccctatgcacaacagcaagggagacctttgtgggtatcggagatgtcgcgcaaccggcgtctacaccaccagcttcgggaacacgctgacgtgctatctcaaagccacggccgccatcagggcggcggcgctgagagactgcactatgttggtttgcggtgatgacttagtcgtcatcgctgagagcgacggcgtagaggaggacaaccgagccctccgagccttcacggaggctatgacgagatactcggctcccccaggtgacgctccgcagccagcatatgacctggaactaataacatcatgttcatccaacgtctcagtcgcgcacgacgtgacgggtaaaaaggtatattacctaacccgagaccctgaaactcccttggcgcgagctgtatgggagacagtccgacacactccagtcaattcctggttgggaaacatcatagtctacgctcccacaatatgggtgcgcatgatattgatgacccactttttctcaatactccagagccaggaagcccttgagaaagcactcgacttcgatatgtacggagtcacctactctatcactccgctggatttaccggcaatcattcaaagactccatggcttaagcgcgttcacgctgcacggatactctccacacgaactcaaccgggtggccggagccctcagaaaacttggggtacccccgctgagagcgtggagacatcgggcccgagcagtccgcgctaagcttatcgcccagggaggtagagccaaaatatgtggcatatacctctttaactgggcggtaaaaaccaaactcaaactcactccattgcctgccgctgccaaactcgatttatcgggttggtttacggtaggcgccggcgggggagacatttatcacagcatgtctcatgcccgaccccgctatttactcctgtgcctactcatacttacagtaggggtaggcatcttcctgctgcctgctcggtag

SEQ ID NO: 15604 - DNA, 36 bp, unidentified; identical to SEQ ID NO: 8803
  misc_feature 1..36: note = Synthetic
  source 1..36: mol_type = other DNA

SEQ ID NO: 15605 - DNA, 75 bp, unidentified
  misc_feature 1..75: note = Synthetic
  source 1..75: mol_type = other DNA
atagaaactggagaaatcaaaacattttcatccgtgtgttttaagattagttctttaaagatatccatggtatag

SEQ ID NO: 15606 - DNA, 117 bp, unidentified; identical to SEQ ID NO: 8808
  source 1..117: mol_type = other DNA
  misc_feature 1..117: note = Synthetic

SEQ ID NO: 15607 - DNA, 15 bp, unidentified
  misc_feature 1..15: note = Synthetic
  source 1..15: mol_type = other DNA
atgactcggggatga

SEQ ID NO: 15608 - DNA, 24 bp, unidentified
  source 1..24: mol_type = other DNA
  misc_feature 1..24: note = Synthetic
ctgttcgaacgcctaatctactag

SEQ ID NO: 15609 - DNA, 2493 bp, unidentified
  source 1..2493: mol_type = other DNA
  misc_feature 1..2493: note = Synthetic
atgagcaagatggcagtattattcctggctgtctttttgatgaatagtgttttaatgatatattgtgatccggatcattatatcagagcgggctataatcacaaatatccttttcggatttgttcgattgccaaaggcacggatttaatgcggttcgacagagatatttcgtgctcgccgtataagtctaatgcaaagatgtcggagggttttttcatcatttacaaaacaaatatcgagacctacacttttccagtgagaacgtataaaaaagagttgacgttccaaagtagttaccgtgatgtgggtgtggtttattttctggatcggacggtgatgggtttggccatgccggtgtacgaagcaaatttagttaattctcatgcgcagtgttattccgccgtagcgatgaaacgacccgatggtacggtgtttagtgcctttcatgaggataataataaaaacaatactctaaatttatttcctctgaatttcaaatctataactaataaaagatttatcactacgaaagaaccctactttgcaaggggtcctttgtggctatattctacatcaacgtctctcaattgtattgtgacggaggctacggctaaggcgaaatacccgtttagttactttgctttgacgactggcgaaatcgtggaagggtctccgttcttcaacggttcaaacggtaaacattttgcagagccgttagaaaaattgacaatcttggaaaactatactatgatagaagatctaatgaatggtatgaatggggccactacgttagtgaggaaaatcgcttttctcgagaaagcggatactttgttttcttgggaaatcaaggaagagaatgaatcggtgtgtatgctaaagcactggaccacggtgactcacgggcttcgagcggagacgaatgagacctatcactttatctctaaggagttgacagccgctttcgtcgcccccaaggagtccttaaatcttaccgatccgaaacaaacgtgtattaagaatgaatttgaaaaaataattaatgaagtctatatgtcagattataatgatacatatagcatgaatggtagttatcaaatttttaagactacgggagatttgattttgatttggcaacctcttgtgcaaaaatctcttatgtttcttgagcagggttcggaaaaaatacgtaggaggcgagatgtgggggatgttaagtctagacatgatattctttatgtgcaattacagtatctttatgatactttgaaagattatatcaatgatgcattggggaatttggcagaatcttggtgtctcgatcaaaagcgaacgataacgatgttgcacgaacttagtaagattagtccgtcgagtatcgtgtctgaggtttacggtcgtccgatatctgcacagttgcatggtgacgtgttagctatctcgaaatgcatagaggttaatcagtcatccgttcagcttcataagagtatgcgggtcgtcgatgcaaagggagtaaggagtgaaacgatgtgttataatcggcccttggtgacgtttagttttgtgaactcgacgcctgaggttgtccctggccagctagggttagataatgaaattctgttgggtgatcataggacagaggaatgtgaaatacctagtacaaagatctttttatctggaaatcatgcgcacgtgtataccgattatacgcatacgaattcgacgcccatagaagacattgaggtattggatgcttttattagactaaaaatcgatcctcttgaaaatgccgattttaaagtactcgatttatattcgccggacgaattgagtagagcaaacgttttcgatctagagaatattcttcgtgaatataactcatataagagcgcactatatactatagaagctaaaattgctacgaatacaccttcgtatgttaatgggattaattcttttttacaagggcttggggctataggcactggattgggctcggttataagtgttacggcaggagcgcttggggatattgtgggtggagtggtgtcttttctaaaaaatccattcgggggtggtctcatgttgattttagcgatagtagttgttgtgataataattgtggttttcgttagacaaagacatgtgcttagtaagcctattgacatgatgtttccttatgccaccaatccggtgactactgtgtccagtgttacggggaccactgtcgtcaagacacctagtgttaaggatgttgacgggggcacatctgttgcggtttcggaaaaggaggagggtatggctgacgtcagtgggcaagtaagtgacgatgaatattcacaagaagatgctttaaaaatgctcaaggccataaagtccttagacgagtcctacagaagaaaaccttcgtcttctgagtctcatgcctcaaaacctagtttgatagacaggatcaggtatagaggttataagagtgtaaatgtagaagaagcgtga

SEQ ID NO: 15610 - DNA, 24 bp, unidentified
  misc_feature 1..24: note = Synthetic
  source 1..24: mol_type = other DNA
ctgttcgaacgcctaatctactag

SEQ ID NO: 15611 - DNA, 2493 bp, unidentified
  misc_feature 1..2493: note = Synthetic
  source 1..2493: mol_type = other DNA
atgagcaagatgagagtattattcctggctgtctttttgatgaatagtgttttaatgatatattgcgattcggatgattatatcagagcgggctataatcacaaatatccttttcggatttgttcgattgccaaaggcactgatttgatgcggttcgacagagatatttcgtgttcgccatataagtctaatgcaaagatgtcggagggttttttcatcatttacaaaacaaatatcgagacctacacttttccagtgagaacatataaaaacgagctgacgttcccaaccagttaccgtgatgtgggtgtggtttattttctggatcggacggtgatgggtttggccatgccggtgtacgaagcaaatttagttaattctcgtgcgcagtgttattcagccgtagcgataaaacgacccgatggtacggtgtttagtgcctatcatgaggataataataaaaacgaaactctagaattatttcctctgaatttcaagtctgttactaataaaagatttatcactacgaaagaaccctactttgcaaggggtcctttgtggctctattctacatcgacgtctctcaattgtattgtgacggaggctacggctaaggcgaaatatccgtttagttactttgctttgacgactggtgaaatcgtggaagggtctccgttcttcgacggttcaaacggtaaacattttgcagagccgttagaaaaattgacaatcttggaaaactatactatgatagaagatctaatgaatggtatgaatggggctactacgttagtaaggaagatcgcttttctggagaaaggggatactttgttttcttgggaaatcaaggaagagaatgaatcggtgtgtatgctaaagcactggactacggtgactcacgggcttcgagcggagacggatgagacttatcactttatttctaaggagttgacagccgctttcgtcgcctccaaggagtctttaaatcttaccgatcccaaacaaacgtgtattaagaatgaatttgagaagataattacagatgtctatatgtcagattataatgatgcatacagcatgaacggtagttatcaaatttttaagactacgggagatctgattttgatttggcagcctcttgtgcaaaaatctcttatggttcttgagcagggttcagtaaacttacgtaggaggcgagatttggtggatgtcaagtctagacatgatattctttatgtgcaattacagtacctctatgatactttgaaagattatatcaacgatgccttggggaatttggcagaatcttggtgcctcgatcaaaaacgaacgataacgatgttgcacgaacttagtaagatcagtccatcgagtatcgtgtctgaggtttacggtcgtccgatatctgcacagttgcatggtgatgtgttagctatctcgaaatgcatagaagttaatcaatcatccgttcagctttataagagtatgcgggtcgtcgatgcgaagggagtaaggagtgaaacgatgtgttataatcggcccttggtgacgtttagctttgtgaactccacgcctgaggttgtccttggtcagctagggttagataatgagattctgttgggtgatcataggacagaggaatgtgagatacctagtacaaagatatttctatctggaaatcatgcacacgtgtataccgattatacgcatacgaattcgacgcccatagaagacattgaggtattggatgcttttattagactaaagatcgaccctctcgaaaatgctgattttaaactacttgatttatattcgccggacgaattgagtagagcaaacgttttcgatttagagaatattcttcgtgaatataactcatataagagcgcactatatactatagaagctaaaattgctactaatacgccgtcgtatgtcaatgggattaattcttttttacaagggcttggggctataggcactggattgggctcggttataagtgttacggcaggagcacttggggatattgtgggtggagtggtgtcttttttaaaaaatccattcgggggtggtctcatgttgattttagcgatagtagttgtcgttataataattgtggttttcgttagacaaaaacatgtgcttagtaagcctattgacatgatgtttccttatgccaccaatccggtgactactgtgtccagtgttacggggaccactgtcgtcaagacgcctagtgttaaagatgctgacgggggcacatctgttgcggtttcggaaaaagaggagggtatggctgacgtcagtggacaaataagtggtgatgaatattcacaagaagatgctttaaaaatgctcaaggccataaagtctttagacgagtcctacagaagaaaaccttcgtcttctgagtctcatgcctcaaaacctagtttgatagacaggatcaggtatagaggttataagagtgtaaatgtagaagaagcgtga

SEQ ID NO: 15612 - DNA, 21 bp, unidentified
  source 1..21: mol_type = other DNA
  misc_feature 1..21: note = Synthetic
atgtcaagtttattcgaatag

SEQ ID NO: 15613 - DNA, 42 bp, unidentified; identical to SEQ ID NO: 2581
  source 1..42: mol_type = other DNA
  misc_feature 1..42: note = Synthetic

SEQ ID NO: 15614 - DNA, 18 bp, unidentified
  misc_feature 1..18: note = Synthetic
  source 1..18: mol_type = other DNA
atgatgataaggatttaa

SEQ ID NO: 15615 - DNA, 18 bp, unidentified
  source 1..18: mol_type = other DNA
  misc_feature 1..18: note = Synthetic
atgggtgtgtgccagtag

SEQ ID NO: 15616 - DNA, 21 bp, unidentified
  misc_feature 1..21: note = Synthetic
  source 1..21: mol_type = other DNA
atggatacaggcttggtctaa

SEQ ID NO: 15617 - DNA, 21 bp, unidentified
  misc_feature 1..21: note = Synthetic
  source 1..21: mol_type = other DNA
atggatacaggcttggtctaa

SEQ ID NO: 15618 - DNA, 876 bp, unidentified
  source 1..876: mol_type = other DNA
  misc_feature 1..876: note = Synthetic
atgggcgttgttgtcgtcaacgtaatgaccctccttgaccagaacaacgccctgccccggacttccgtcgacgcaagcccggccctgtggagcttcctgcttaggcagtgccgcattttggcatcagaacccctgggtaccccggtcgtcgttcgtccggccaaccttcgacggttggccgagccgctgatggacttacccaaacccacccgcccgatcgtgcgcactaggtcctgtcgctgccccccaaacaccaccacgggcctgtttgcggaggacagccccttggagagcaccgaggtcgtggacgccgtggcgtgcttccgactgctgcaccgagaccaacccagcccccctcgcctctaccacttgtgggtggtaggcgcggcggatctgtgtgtgccgtttctcgaatacgcccaaaaaatccggctcggggtaagatttatcgccatcaagaccccagacgcgtgggtgggagaaccgtgggccgtgccgactcggtttttgcccgagtggaccgtggcgtggaccccgttccccgcggcccccaaccaccccctggagaccctgctcagccggtacgaataccagtacggcgtggtactgcccgggacaaacggacgggagcgcgattgtatgcgctggctgcggtccctgattgctctgcacaaaccccacccagctaccccaggcccccttacgacgtcccatccggtgcggcgtccgtgttgtgcgtgtatgggcatgcccgaggtcccagacgagcaacccacatcgccgggccgtggtccgcaagaaactgaccctctgatcgccgttcgcggcgaacggccccgacttcctcacatctgctatccggttaccaccctttag

SEQ ID NO: 15619 - DNA, 207 bp, unidentified
  source 1..207: mol_type = other DNA
  misc_feature 1..207: note = Synthetic
ctggaccagactctgggccacgggctcgcgtgccgacacttcgacctgcgcacggctgcgaggcagctgtcggtggtagtcaccgagaacgcgctggtggcggtgcgcggcaaccaccgcttcaccgaggctgacctcttcgtcgacgccatcgtggccggcggcctggagaaactctgcgaggaggcccaaaacatgcaaaaatga

SEQ ID NO: 15620 - DNA, 18 bp, unidentified
  source 1..18: mol_type = other DNA
  misc_feature 1..18: note = Synthetic
atgagtgcagaatattaa

SEQ ID NO: 15621 - DNA, 42 bp, unidentified; identical to SEQ ID NO: 2581
  source 1..42: mol_type = other DNA
  misc_feature 1..42: note = Synthetic

SEQ ID NO: 15622 - DNA, 42 bp, unidentified; identical to SEQ ID NO: 2581
  misc_feature 1..42: note = Synthetic
  source 1..42: mol_type = other DNA

SEQ ID NO: 15623 - DNA, 39 bp, unidentified; identical to SEQ ID NO: 8832
  source 1..39: mol_type = other DNA
  misc_feature 1..39: note = Synthetic

SEQ ID NO: 15624 - DNA, 234 bp, unidentified
  misc_feature 1..234: note = Synthetic
  source 1..234: mol_type = other DNA
atggctctcacatgccgcattcgcgtccccattacgggctaccgaggaagaaaaccgcgccgtagaaggctggcgggaagcgggatgcgccgccacccccaccggcggcggcgcgccatcagcaagcggttggggggaggcttcctgcccgcgctgatccccatcatcgccgcggcgatcggggcgatccccggcattgcttccgtggcggtgcaggcctctcagcgccactga

SEQ ID NO: 15625 - DNA, 12 bp, unidentified
  source 1..12: mol_type = other DNA
  misc_feature 1..12: note = Synthetic
ttgttgttttaa

SEQ ID NO: 15626 - DNA, 297 bp, unidentified; identical to SEQ ID NO: 14411
  source 1..297: mol_type = other DNA
  misc_feature 1..297: note = Synthetic

SEQ ID NO: 15627 - DNA, 72 bp, unidentified; identical to SEQ ID NO: 8837
  source 1..72: mol_type = other DNA
  misc_feature 1..72: note = Synthetic

SEQ ID NO: 15628 - DNA, 141 bp, unidentified; identical to SEQ ID NO: 8838
  misc_feature 1..141: note = Synthetic
  source 1..141: mol_type = other DNA

SEQ ID NO: 15629 - DNA, 246 bp, unidentified
  source 1..246: mol_type = other DNA
  misc_feature 1..246: note = Synthetic
ctgatgacatcacagaaactggcggagaaccactattctcttcctcctgattcatttgctgtctacaggatcaccgactctagctctgattggttcgatctcggtatcgaccgcgacgggttcagttatgtcggcgtttccactcttcctgaattcaactttcctatcactgcaaccttcatgggagtgcagctagctaaggtcaagctggcgttcaaggttaagaacagtaagacaaaattatga

SEQ ID NO: 15630 - DNA, 108 bp, unidentified
  misc_feature 1..108: note = Synthetic
  source 1..108: mol_type = other DNA
attggttcgatctcggtatcgaccgcgacgggttcagttatgtcggcgtttccactcttcctgaattcaactttcctatcactgcaaccttcatgggagtgcagctag

SEQ ID NO: 15631 - DNA, 717 bp, unidentified
  misc_feature 1..717: note = Synthetic
  source 1..717: mol_type = other DNA
atgtggcgctttttgcaaaataagaatttaaatacattccacgcccaagagctgcgttttatccacttggttctctgcaagatgtacaatttcggtctaaatgtgtacctgttaagggaggctactgccaatgccgggacctacgacgaggtggtcctgggacgcaaggttcctgcggaggtgtggaagctcgtgtacgatgggctcgaggagatgggcgtgtccagcgagatgctgctgtgtgaggcataccgggacagcctctggatgcacttgaacgataaggtggggctcttgaggggcctggcgaattatctgtttcaccggctaggggtcacccacgacgttcgcatcgccccggaaaacctggtggacggaaactttttgtttaatctgggaagtgtgctcccctgcaggctgctccttgcggcgggctactgtctcgccttttggggcagcgatgaacacgaacgctgggtgcgcttcttcgcccagaagcttttcatttgctacctgatagtctccgggcgtcttatgccacagaggtctctgctagtttgggccagcgaaacgggctatcccggtccggtggaggcagtctgtcgcgacatccgctccatgtacggcatacgaacgtatgcggtctcgggttatcttccggctccgtctgaagcgcagctggcctaccttggtgcgtttaacaacaacgcggtttaa

SEQ ID NO: 15632 - DNA, 54 bp, unidentified; identical to SEQ ID NO: 8843
  source 1..54: mol_type = other DNA
  misc_feature 1..54: note = Synthetic

SEQ ID NO: 15633 - DNA, 1644 bp, unidentified
  misc_feature 1..1644: note = Synthetic
  source 1..1644: mol_type = other DNA
atgaaacgagccagatttgaagatgacttcaaccccgtctacccttacgaacactacaatccccttgacattccatttattacacccccgtttgcttcctccaacggcttgcaagaaaaacctccgggagtcctcagcctgaaatacactgatccacttacaaccaaaaacggggctttaaccttaaaattgggcacgggactaaacattgataaaaatggagatctttcttcagatgctagcgtggaagttagcgcccctatcactaaaaccaacaaaatcgtaggtttaaattacactaagcctctcgctctgcaaaataacgcgcttactctttcttacaacgcgccctttaacgtagtaaataataatttagctctaaatatgtcacagcctgttactattaatgcaaacaacgaactttctctcttaatagacgccccacttaatgctgacacgggcactcttcgccttcgaagtgatgcacctcttggactagtagacaaaacactaaaggttttgttttctagccccctctatctagataataactttcttacactagccattgaacgcccgctagctctatccagtaacagagcagtggcccttaagtattcaccacctttaaaaatagaaaacgaaaacttaaccctaagcacaggcggaccttttactgtaagcgggggaaatttaaacctggcaacatcggcacccctctccgtgcaaaacaattctctctccttaggggttaacccgccttttctcatcactgactctggattagctatggacttaggagacggtcttgcattaggtggctctaagttaataatcaatcttggtccaggtttacaaatgtctaatggagctattactttagcactagatgcagcgctgcctttgcaatataaaaacaaccaacttcaactcagaattggctccgcgtctgctttaattatgagcggagtaacacaaacattaaacgtcaatgccaataccagcaaaggtcttgctattgaaaataactcactagttgttaagctaggaaacggtcttcgctttgatagctggggaagcatagctgtctcacctactaccactacccctaccaccctatggaccaccgcggacccgtctcctaacgccactttttatgaatcactagacgccaaagtgtggctagttttagtaaaatgcaacggcatggttaacgggaccatatccattaaagctcaaaaaggcactttacttaaacccacagctagctttatttcctttgtcatgtatttttacagcgacggaacgtggaggaaaaactatcccgtgtttgacaacgaagggatactagcaaacagtgccacatggggttatcgacaaggacagtctgccaacactaacgtttccaatgctgtagaatttatgcctagctctaaaaggtatcccaatgaaaaaggttctgaagttcagaacatggctcttacctacacttttttgcaaggtgaccctaacatggccatatcttttcagagcatttataatcatgcaatagaaggctactcattaaaattcacctggcgcgttcgaaataatgaacgttttgacatcccctgttgctcattttcttatgtaacagaacaataa

SEQ ID NO: 15634 - DNA, 120 bp, unidentified
  source 1..120: mol_type = other DNA
  misc_feature 1..120: note = Synthetic
atgacttcaaccccgtctacccttacgaacactacaatccccttgacattccatttattacacccccgtttgcttcctccaacggcttgcaagaaaaacctccgggagtcctcagcctga

SEQ ID NO: 15635 - DNA, 228 bp, unidentified
  misc_feature 1..228: note = Synthetic
  source 1..228: mol_type = other DNA
ataaccgttctaactgcgatctgtataactgtattaatgcttttgatggtaatttctggcaccgccatgatagtcaaggagttaaatcctaatgatatattcactatgcaatcattaaagtttaatcgaaccgtaacgattttcaaatatataggactctttatctatataccaggaacgataattttgtacgctacatacgtcaaatccctattaatgaaaaattaa

SEQ ID NO: 15636 - DNA, 258 bp, unidentified
  misc_feature 1..258: note = Synthetic
  source 1..258: mol_type = other DNA
atctaccaacttaaatacaccgcctataaatttacaatgaaacacagattgtattctgaaggattgagtattagtaatgatttaaactcgataatcggtcaacaatctacaatggatacggatatagaaatagacgaagatgacatcatggaacttcttaatatattgactgagttaggttgtgatgtcgactttgatgaaaattttagcgatatagccgatgatattctagaatcgttgatagaacaggatatataa

SEQ ID NO: 15637 - DNA, 258 bp, unidentified
  misc_feature 1..258: note = Synthetic
  source 1..258: mol_type = other DNA
atctaccaacttaaatacaccgcctataaatttacaatgaaacacagattgtattctgaaggattgagtattagtaatgatttaaactcgataatcggtcaacaatctacaatggatacggatatagaaatagacgaagatgacatcatggaacttcttaatatattgactgagttaggttgtgatgtcgactttgatgaaaattttagcgatatagccgatgatattctagaatcgttgatagaacaggatgtataa

SEQ ID NO: 15638 - DNA, 30 bp, unidentified; identical to SEQ ID NO: 8852
  source 1..30: mol_type = other DNA
  misc_feature 1..30: note = Synthetic

SEQ ID NO: 15639 - DNA, 24 bp, unidentified
  misc_feature 1..24: note = Synthetic
  source 1..24: mol_type = other DNA
atggaaaatgtacgttcaatgtaa

SEQ ID NO: 15640 - DNA, 24 bp, unidentified
  misc_feature 1..24: note = Synthetic
  source 1..24: mol_type = other DNA
acgaagattataggggaaatatag

SEQ ID NO: 15641 - DNA, 15 bp, unidentified
  misc_feature 1..15: note = Synthetic
  source 1..15: mol_type = other DNA
atacatttaatgtaa

SEQ ID NO: 15642 - DNA, 285 bp, unidentified
  misc_feature 1..285: note = Synthetic
  source 1..285: mol_type = other DNA
atgccccggttggagcctaagcgcggctcgtatcggccggtttccgcgacaagcgagggtttggcagccccgttatttccaagaccccgccagccgacttctccagtttacgggagcgagcccttttttttttttttttgtttttgtcgcccagatgcatccagtgctgcgacagatgcgcccccagcaacaggccccttctcagcaacagccacaaaaggctcttcttgctcctgcaactactgcagctgcagccgtgagcggcgcgggacagcccgcctatga

SEQ ID NO: 15643 - DNA, 21 bp, unidentified
  misc_feature 1..21: note = Synthetic
  source 1..21: mol_type = other DNA
atggtctgtccctggacgtag

SEQ ID NO: 15644 - DNA, 21 bp, unidentified
  misc_feature 1..21: note = Synthetic
  source 1..21: mol_type = other DNA
atggtctgtccctggacgtag

SEQ ID NO: 15645 - DNA, 21 bp, unidentified
  source 1..21: mol_type = other DNA
  misc_feature 1..21: note = Synthetic
atggtctgtccctggacgtag

SEQ ID NO: 15646 - DNA, 27 bp, unidentified
  source 1..27: mol_type = other DNA
  misc_feature 1..27: note = Synthetic
attcagccccgtccaagacacacctga

SEQ ID NO: 15647 - DNA, 30 bp, unidentified; identical to SEQ ID NO: 8870
  source 1..30: mol_type = other DNA
  misc_feature 1..30: note = Synthetic

SEQ ID NO: 15648 - DNA, 75 bp, unidentified; identical to SEQ ID NO: 8871
  source 1..75: mol_type = other DNA
  misc_feature 1..75: note = Synthetic

SEQ ID NO: 15649 - DNA, 303 bp, unidentified
  misc_feature 1..303: note = Synthetic
  source 1..303: mol_type = other DNA
atgtcgctgctaacaccagcagtacttttgacccagaggtcgcatacgctaactttaagcgtgtccacaccactgggcttagttatgaccacatacgaatcttctacattaaaggacgcgagattaaaactagtctcgcaaaaagaagtgaatgggaagttacacttaaccttgggggctggaagattactgtatataatacgaattttcctggcaaccggaacaacccagttcctgacgatggtcttaccctccaccgcctcagtggattccttgccaggtacctacttgagaagatgctga

SEQ ID NO: 15650 - DNA, 33 bp, unidentified; identical to SEQ ID NO: 8875
  source 1..33: mol_type = other DNA
  misc_feature 1..33: note = Synthetic

SEQ ID NO: 15651 - DNA, 1455 bp, unidentified
  misc_feature 1..1455: note = Synthetic
  source 1..1455: mol_type = other DNA
atgtacaaaggatgggactcagaagcgttgcctatacaatctgagatactaaacgagattctgttatattgctacctcactcctcaaccaccgatcccttccgagacgacaacagccaccagccccacaaacatagaaaacgaaatatccaatttagacaactctgaaaacctagaggaattaaagcaactatccgtcgcattaaatatagacagacgatgcaacatctgctccattgtaaatctgtgcctcaaacaaaacaaatcatggatctacgactacagtctactgtgctacaaatgcaactacgcgccaaaaactccactgtctcttctgatcgtttccacagaatttttaatgttaatacgggaacgatttccaaacatcaatttcgacggtctttttctaaacaacattgtctccatctttgactttcacgttcatttttttattcacagatgcttcgcaaatacagtcaacgatcacatccaaagcgaaaacataaccctgaatcacatggcaataatccgatcgaccctgctaaaagaagacactataccgcacatcaaaataaaaaaatttctaaccaaaaaaatgaacccgaaaaaaacacaaagctccgaactgaataaaaaactcacagtgcccatgaagactcgcttcacgacactcttattctatatgtggtctggcacgaacgtcttcgaccgagttcccttcacggacctaactatccgcaaacatcgcttcatcaaaaacctgtattccaataaaaccgacatcgaactcacagctggtcccattcttttggcacagattccattttctatcaccaaaaacaaaacaaccagcgtctgtctcctatgtgaactgatggcagcttccaaacaagattacctatttttaaaatatctacatcagagcatcatggactactgtcaaaacaacctaaagatgatagatagagttcagttcgtcatcgccgatatcttcgagaagacaaaaatacacacgcacgtcaaaaatctttccgactacagcaaggcgatattcgataacgaattctcattctcagatgataacttcactctcgatacccacgtttacctgatactccgccagactggaacagtgggagtctataagcacttcttttgtgatcccctgtgtctagcaaactgtaaaaccatcaacccggaggttctcttcaacactacagacgccggagaaatccaagacttgaaagtcaccatatgctaccgtaacgaatatttaagcatcgtcgaaaaacatgtttggctagcgatacatcttttcaaagcttttcagattattaaaccaaaccataaaaataaaactcaaattacagagtttctcaaagacttcactaacctattagcacttcaccacttcgatatcgtcgatcccattttcaccgtcaactactacgtttga

SEQ ID NO: 15652 - DNA, 36 bp, unidentified; identical to SEQ ID NO: 8877
  misc_feature 1..36: note = Synthetic
  source 1..36: mol_type = other DNA

SEQ ID NO: 15653 - DNA, 39 bp, unidentified; identical to SEQ ID NO: 8880
  source 1..39: mol_type = other DNA
  misc_feature 1..39: note = Synthetic

SEQ ID NO: 15654 - DNA, 1455 bp, unidentified
  source 1..1455: mol_type = other DNA
  misc_feature 1..1455: note = Synthetic
atgtacaaaggatgggactcagaagcgttgtctatacaatctgagatagtaaacgagattctgttatattgctacctcactccccaaccaccaattccttccgagacgacaacagccaccagccccacgaacatagaaaacgaaatctccaatttagaaagctctgaaaacctagaggaattaaagcgattatccgtcgcattaaatatagacagacgatgcaatatctgctccatcgtaaatctgtgcctcaaacaaaacaaatcatggatctacgactacagtctactgtgctacaaatgcaactacgcgccaaagactccattgtctcttctgattgtctccgcggaatttataatgttaatacgagaacgatttccaaacatcaattttgacggcctttttcagaacaacattgtctccatctttgacttccacgttcatttttttattcacagatgcttcgcaaatacggtcaacgatcacatccaaagcgaaaacataaccctgaatcacatggccataatccgatcgaccctactaaaagaagacagtataccgcacatcaaaataaaaaaatttctaaccaaaaaaatgaacccgaaaaaaacacaaagccccgaactgaataaaaaactcacagtgcccatgaagactcgcttcacgacactcttattctatatgtggtctggcacaaacgtcttcgaccgagttcccttcacggacctaactatccgcaaacatcgcttcatcaaaaacctgtattccaacaaaaccgacatcgaactcacagctggtcccattctcttggcacagattccattttccatcaccaaaaacaaaacaaccagcgtctgtctgctatgtgaactgatggcagcttccaaacaagattacctatttttaaaatatctacatcaaagcatcatggactactgtcaaaacaacctaaagatgatagatagagttcagttcgtcattgccgatatcttcgagaagacaaaaatacacatgcacgtcaagaatctttccgactacagcaaggcgatattcgataacgaattctcattctccgatgataacttcactctcgatacccacgtttacctgatactccgccagactggaacagtgggagtctataagcacttcttctgtgatcctctgtgtctggcaaactgtaaaaccattaacccggaggttctcttcaacactacagacgccggagaaatccaagacttgaaagtcaccatatgctaccgtaacgaatatttaagcatcgtcgaaaaacatgtttggctagcgatacatcttttcaaagcttttcagattattaaaccaaaccataaaaataaaactcaaattgcagagtttctcaaagacttcactaacttattagcgcttcaccacttcgatatcgtcgatcccattttcaccgtcaactactacgtttaa

SEQ ID NO: 15655 - DNA, 486 bp, unidentified
  source 1..486: mol_type = other DNA
  misc_feature 1..486: note = Synthetic
atgaaacgtaatgaggagtattgcgggctacataaattaaaaatggaaatttttaatgtagaagaattgataaatatgaaaccttttaagaatatgaataaaataacaattaatcaaaaggataattgtatattagcaaatagatgctttgttaaaatagatactcctagatacataccattgacatccattagtagttctaatatcatcagaatacggaatcatgattttacattatctgaactattgtattcaccgtttcattttcaacagcctcagtttcaatatctccttcctgggtttgtattaacgtgtattgataaagtttcgaaacagcaaaaagaatgtaaatattgtatctctaatcgtggagatgatgatagtttaagcattaatctatttattccaactattaacaagtctatatatattattatcggtttacggatgaaaaatttttggaagcctaaattcgaaatagaataa

SEQ ID NO: 15656 - DNA, 318 bp, unidentified
  source 1..318: mol_type = other DNA
  misc_feature 1..318: note = Synthetic
atggcaaaaatgtgcatccgagagtacccagtgcaaaggcatcaatggcgcaacggatacagcgcgcgggcacaggaacaaggcaaagtccgccatcggagcaccccggcgcgaggcacgcgtttcgctgccgaaagacagggagtggcgcgcccgcttggcaacggtggtcgagtctgtgcaatgcttgttctcgcgagcatttcgtggcccgcgcttcgcacgccgggcaaaagtgaacaaacatgcctcttgggagcaaaggcatggagccactcacgtaccgctgcttcgagcgcctgccgttctgcgcgctag

SEQ ID NO: 15657 - DNA, 42 bp, unidentified; identical to SEQ ID NO: 8887
  source 1..42: mol_type = other DNA
  misc_feature 1..42: note = Synthetic

SEQ ID NO: 15658 - DNA, 75 bp, unidentified; identical to SEQ ID NO: 8888
  misc_feature 1..75: note = Synthetic
  source 1..75: mol_type = other DNA

SEQ ID NO: 15659 - DNA, 21 bp, unidentified
  misc_feature 1..21: note = Synthetic
  source 1..21: mol_type = other DNA
atgattaatttcaataactaa

SEQ ID NO: 15660 - DNA, 42 bp, unidentified; identical to SEQ ID NO: 8896
  misc_feature 1..42: note = Synthetic
  source 1..42: mol_type = other DNA

SEQ ID NO: 15661 - DNA, 57 bp, unidentified; identical to SEQ ID NO: 8897
  misc_feature 1..57: note = Synthetic
  source 1..57: mol_type = other DNA

SEQ ID NO: 15662 - DNA, 978 bp, unidentified
  source 1..978: mol_type = other DNA
  misc_feature 1..978: note = Synthetic
atggcgactgtgaataaaactcctgttattgttgtgccagttattgatagacctccatcagaaacatttcctaatcttcatgagcatattaatgatcagaagttcgatgatgtgaaggacaacgaagttatgccagaaaaaagaaatgttgtgatagtcaaggatgatccagatcattacaaggattatgcgtttatacactggactggaggaaacattagaaatgatgacaagtatactcacttcttttcagggttttgtaacaccatgtgtacagaggaaacgaaaagaaatatcgctagacatttagccctatgggattctaaattttttaccgagttagaaaataaaaaggtagaatatgtagttattgtagaaaatgataacgttattgaggatattacgtttcttcgtccagtcttaaaggcaatgcatgacaagaaaatagatatcctacagatgagagaaattattacaggcaataaagttaaaaccgagctagtaatggacaaaaatcatgtcatattcacatatacaggagggtatgatgttagcttgtcagcctatattattagagttactacggcgctgaacattgtagatgaaattataaagtctggaggtctatcatcgggattttattttgaaatagccagaatcgaaaacgaaataaagattaacaggcaaataatggataactctgccaaatacgtagaacacgatcctcgtcttgttgcagaacaccgctttgaaaacatgaaaccaaatttttggtctagaataggaacggcagctgttaaacgttatccaggagttatgtacgcatttactactccactgatttcattttttggattgtttgatattaatgttataggtttgattgtaattttgtttattatgtttatgctcatctttaacgttaaatctaagctgttatggttccttacaggaacatttgttaccgcatttatctaa

SEQ ID NO: 15663 - DNA, 24 bp, unidentified
  misc_feature 1..24: note = Synthetic
  source 1..24: mol_type = other DNA
atgatcagaagttcgatgatgtga

SEQ ID NO: 15664 - DNA, 24 bp, unidentified
  source 1..24: mol_type = other DNA
  misc_feature 1..24: note = Synthetic
atgatcagaagttcgatgatgtga

SEQ ID NO: 15665 - DNA, 33 bp, unidentified
  source 1..33: mol_type = other DNA
  misc_feature 1..33: note = Synthetic
atgaagttatgcaagaaaaaagagatgttgtga

SEQ ID NO: 15666 - DNA, 57 bp, unidentified; identical to SEQ ID NO: 8897
  source 1..57: mol_type = other DNA
  misc_feature 1..57: note = Synthetic

SEQ ID NO: 15667 - DNA, 978 bp, unidentified
  source 1..978: mol_type = other DNA
  misc_feature 1..978: note = Synthetic
atggcggcggcgaataaaactcctgttattgttgtgccagttattgatagacctccatcagaaacatttcctaatgttcatgagcatattaatgatcagaagttcgatgatgtgaaggacaatgaagttatgccagaaaaaagagatattgtgatagtcaaggatgatccagatcattacaaggattatgcgtttatacaatggactggaggaaacattagagatgatgacaagtatactcacttcttttcagggttttgtaacactatgtgtacagaggaaacgaaaagaaatatcgctagacatttagccctatgggattctaaattttttaccgagctagaaaataaaaaggtagaatatgtagttgttgtagaaaacgataacgttattgaggatattacgtttcttcgtcccgtcttgaaggcaatgcatgacaagaaaatagatatcctacagatgagagaaattattacaggcaataaagttaaaactgagctagtaatggacaaagatcatgccatattcatatatacaggagggtatgatgttagcttatcagcctatattattagagttactacggcgctgaacatcgtagatgaaattataaagtctggaggtctatcatcgggattttattttgaaatagccagaatcgaaaacgaaatgaagatcaataggcagatactggataacgccgccaaatatgtagaacacgatcctcgacttgttgcagaataccgtttcgaacacatgaaaccgaatttttggtctagaataggaacggcagctgctaaacgttatccaggagttatgtacgcgtttactactccactgatttcattttttggattgtttgatattaatgttataggtttgattgtaattttgtttattatgtttatgctcatctttaacgttaaatctaaactgttatggttccttacaggaacatttgttaccgcatttatctaa

SEQ ID NO: 15668 - DNA, 24 bp, unidentified
  misc_feature 1..24: note = Synthetic
  source 1..24: mol_type = other DNA
atgatcagaagttcgatgatgtga

SEQ ID NO: 15669 - DNA, 918 bp, unidentified
  misc_feature 1..918: note = Synthetic
  source 1..918: mol_type = other DNA
atggatgtgtctggggagccgaccgtttgttccaacgcgtatgccaatgaaatgaaactatcggattcaaaggacatttatgttttggcccatccggttaccaaaaaaacccgcaagcgaccccgcgggctgcctttgggggttaagctagaccccccaaccttcaagttaaataacatgtcacatcattacgacacggaaacgttcacccccgtctcttcgcaactggattcggttgaagttttcagcaagtttaacatttcccctgagtggtatgacctgttgtcggacgaacttaaagagccgtacgcgaaaggtatttttttagaatacaatcgtcttttaaattcaggggaagaaatacttccatctacaggcgatatttttgcatggacgcgattttgcggaccccagagcattcgcgttgtaattattggtcaagatccataccctaccgcgggacatgcacatgggctagcgtttagtgtaaaacgtggcataacaccaccgtctagtcttaaaaatatttttgcggccctcatggaatcatacccaaatatgactccgcccactcacggatgcctggagagttgggcaaggcagggggtgttattgctgaataccacgcttacggttcgtcgcgggactccggggtcgcatgtatacttaggctgggggcggctggtgcaacgcgtgctacagaggttatgcgagaaccgtacagggttagtttttatgctgtggggtgcgcatgcacagaagacaacccaaccgaattcaagatgtcatctggtgctaacacacgcgcatccgtcgccattgtcccgtgttccatttcggaattgtcgacatttcgttcaagccaatgagtattttacgcgtaaaggcgaacccgagatcgattggagtgttatataa

SEQ ID NO: 15670 - DNA, 57 bp, unidentified; identical to SEQ ID NO: 8907
  misc_feature 1..57: note = Synthetic
  source 1..57: mol_type = other DNA

SEQ ID NO: 15671 - DNA, 45 bp, unidentified; identical to SEQ ID NO: 8909
  misc_feature 1..45: note = Synthetic
  source 1..45: mol_type = other DNA

SEQ ID NO: 15672 - DNA, 1029 bp, unidentified
  misc_feature 1..1029: note = Synthetic
  source 1..1029: mol_type = other DNA
atggatccacccgaaatcacggcctacataatcggggttgccgaaggccgcgggaccaaggaggtgttccccacgctgccgtacctggtgggcctcgccgacgacccgcccaagcctcaacccgcacctgctccctctcctgcgccagcgccagccccagcgccagccccagccccgtcgccggcccccgcgccggcacccaagccatctcctcccgcgccgcaccccaagggcgaccacgtgctcaaggcggtggaatggaaagacgtggactccaaagactacccgcacttcttcacggacatgtgcaagtccacgtgtccgaaggagatgcagcgccgcgcggcacaccacctcaacctctgggagagcatatcagccggcaccgtctccaccaagtactccgacgatgacttcatactggtggtcgacaacgacatgaccttccgcaagcccgagatggtaaagccgcttatcgaggcgatgaagacgaacggctggtacatgacgcagctcaaggagacctacatgaccggcgcactggccaccaacgtccctggcaccggcgaccccgagctcatggtctaccccggcgggtacgacgtctcgctagacgcctacatcatcaacgtcggcggcatgaagaagctctacgaggcgatcatcaaggagggagggctgcgcagcggcctgctcaccgaggtgttcacgctagagaagcggctctctctggcgcgcgtggtgctctccggcgctgagcaggtggtctaccccgagtactacatacaggtgaagacgcggctcggcggcgcgccctccctgtggtcgctgctcgccacgtggctggcgcgcttctggcccggcgccatctacttcctcaccacgccgctcttttccttcatggggctcttcgacgtggacgtggtcgacgtcttcatcctggcatacctgctggtgctcgtgctgctgctgccgaactcgcggctgctgtggttcatcgccgggctgctggtcacggccattgtgtga

SEQ ID NO: 15673 - DNA, 78 bp, unidentified; identical to SEQ ID NO: 8914
  source 1..78: mol_type = other DNA
  misc_feature 1..78: note = Synthetic

SEQ ID NO: 15674 - DNA, 96 bp, unidentified; identical to SEQ ID NO: 1254
  misc_feature 1..96: note = Synthetic
  source 1..96: mol_type = other DNA

SEQ ID NO: 15675 - DNA, 273 bp, unidentified
  source 1..273: mol_type = other DNA
  misc_feature 1..273: note = Synthetic
gtgcaggaaatagccctgggggacggcgtcaccgacaccatctcggccattatagatgaaacattcggtgagtgtcttcccgtactgggggaggcccaaggcgggtacgccctggtctgtagcatgtatctgcacgttatcgtctccatctattcgacaaaaacggtgtacaacagtatgctatttaaatgcacaaagaataaaaagtacgactgcattgccaagcgggtgcggacaaaatggatgcgcatgctatcaacgaaagatacgtag

SEQ ID NO: 15676 - DNA, 273 bp, unidentified; identical to SEQ ID NO: 15675
  misc_feature 1..273: note = Synthetic
  source 1..273: mol_type = other DNA

SEQ ID NO: 15677 - DNA, 192 bp, unidentified; identical to SEQ ID NO: 14037
  source 1..192: mol_type = other DNA
  misc_feature 1..192: note = Synthetic

SEQ ID NO: 15678 - DNA, 426 bp, unidentified
  source 1..426: mol_type = other DNA
  misc_feature 1..426: note = Synthetic
gtgagggaaataaccaggatcaccacccccgccaccaggaccagaatgagcatgccgccgaaggggtttttgaagaaggagatgaaaccagagaccaggctgctaaacaaaccccccaccgtgctgactaggccggcgatgttttgcgcctggaagttgtactcccggaagatgccctccaggtcaaagacgttggaggcacgctgttcgtcccgccctccgtgtgattctcccgcgtgccaaacgagggacactggatgtccgaggagaagcggaacaggtcgccgtggctggagagctcgcagactcggaaaggaaagctggtttgctgacgcgtggcggatggcccggtactgggggtgcgccgtgaaggcggcggcgcagtccgccttcagcgcctccaccgcgtcgcccgaggagctgtag

SEQ ID NO: 15679 - DNA, 249 bp, unidentified
  source 1..249: mol_type = other DNA
  misc_feature 1..249: note = Synthetic
atggcgttaccaggaaaagacatcgtcgcggccgtggcactgacggtactcatgctgctcatggtcgtctccgggggcgcgctggttaccaagggcatcccgccgctgcgcttgctcacgctgcgctcggcgcgcgccgcgcgcgtcgtcgccgtgttggaagtcgtggccgtagtgctcatcgtgcccggtacgctcgcgctgtattcggcgtacgtgcgccagctctgggcgcgctcgcaaaactga

SEQ ID NO: 15680 - DNA, 153 bp, unidentified
  misc_feature 1..153: note = Synthetic
  source 1..153: mol_type = other DNA
atttttcagatggcagttcgagtttcttgtggttccggagtaacaacggttgatgtcgacttactttatcgtctaacacgcattgcagcgtatctgcacattcaggttgaacttctattaaaattgtatcttttaaacaccgattcggaatag

SEQ ID NO: 15681 - DNA, 27 bp, unidentified
  misc_feature 1..27: note = Synthetic
  source 1..27: mol_type = other DNA
atgcccgaaacaagaagaccaggctag

SEQ ID NO: 15682 - DNA, 27 bp, unidentified
  source 1..27: mol_type = other DNA
  misc_feature 1..27: note = Synthetic
atgcccgaaacaagaagaccaggctag

SEQ ID NO: 15683 - DNA, 15 bp, unidentified
  source 1..15: mol_type = other DNA
  misc_feature 1..15: note = Synthetic
atgttggcggtatag

SEQ ID NO: 15684 - DNA, 78 bp, unidentified; identical to SEQ ID NO: 3494
  misc_feature 1..78: note = Synthetic
  source 1..78: mol_type = other DNA

SEQ ID NO: 15685 - DNA, 189 bp, unidentified
  source 1..189: mol_type = other DNA
  misc_feature 1..189: note = Synthetic
ttgtcagaaaatcaggaggaggagcctgcacctcaaagaatagactacaagatagtttcctcgtgtggtggctgcggaattaagcttcgaatttttgcatcgtgtacccaatttggaattagaactctgcaagacctacttcttgaagaaatagcgttgctgtgtcctgactgcaaaaatggcagataa

SEQ ID NO: 15686 - DNA, 108 bp, unidentified; identical to SEQ ID NO: 8940
  source 1..108: mol_type = other DNA
  misc_feature 1..108: note = Synthetic

SEQ ID NO: 15687 - DNA, 45 bp, unidentified; identical to SEQ ID NO: 8942
  misc_feature 1..45: note = Synthetic
  source 1..45: mol_type = other DNA

SEQ ID NO: 15688 - DNA, 45 bp, unidentified; identical to SEQ ID NO: 8942
  source 1..45: mol_type = other DNA
  misc_feature 1..45: note = Synthetic

SEQ ID NO: 15689 - DNA, 2628 bp, unidentified
  source 1..2628: mol_type = other DNA
  misc_feature 1..2628: note = Synthetic
ataatgtccgcccccgtcgtcatcaaggcccttgtggcctcaaacactgacattgcggaggccatcctcgatgccatcctctcgcggcctgacgagggcttccgcctgttttgtttgtgccacaacgcctcgcccctccaccacgtggcgggttctctcgtggaactgcagcttcacctgcccaagaagcggctgacctcacagagccgctgcggcctggttctgacgctgcacctgccggcggaggaggccttccccttcctgcgcggcctcacgccgctcaccgcggaccgtctatccacctacctagatcgcgcgggggccctgcgctcgctcacgcccctcgtggaactgctcacactgagcgctaagaaacagccacagggggatgccagaggccgcgtggcgtggctgcgtcccaagatcgtgggctgtctgcgccgcatctaccgcgttaacatctcggccaggtggttcattagcacctttggctcccacgaggcccagttcgtgctagtcacggctgcttactatttttggggcattccttgtacgattgagaccctggcgcacctcacggagctatttacttccgagtctggtcagagcctggccgccgtcacgtccctggccgagctgggggaggtctttggctcctcggcatgggcggagcagaccgaggcttttgcccactttgcacacgagaaactgcggcgggactcgcgagagatccgcgctgtggcaaggacgatagacgcctacagggggcgccttcccctggcctcggccgatctcgtgcgctacgtctatttggcccacgcacagtgcttcaacgagggaacctttaagcgatactctcagttaacgagcatgggagaaattgggtgtctgccttcggggggcgtcgtgctcccctcgctcctggacaggggctttgcggagcacatgcgcacctacttcacccgggagacttacctggctgagcatgtgcgtgtccagcagctgaaaatccgcatggagcccccggccccatacacgtgggaccccgaccccgatgacggactcatgcgggcctgggccgggctcagtgtggacgtggcccgggagctggtggagctcgcgcgctggcacgcggatgagggtcccacatacccccccacgcttcaagggtttctatgcttggccggccaggccacctgccggggccagtggaatcccaaggaacaattcctcccacccaccgtccttcgaagggtgcagcggctaccggtcttcctctgccattttgcagacaggcactactttgtaatgacagccgctgaccccttctcatcccacctggcggaggtcgtctccaccccgaccaactgccgcctcccagacacgtgtctcaccagggccctctcctacaccccagtgtactattcacagaacagcctgagcgagcagctctttgtctcccggcatgaatactttaatccccggcttccggtctgcaacctggtcttggacctggatctaaagatcaagggggccccctggtcgctggaggaaatctatgacctgtgccggaccgtgcggcgtgaggtactgcgcctcatgcgccgcctgggtccagtgtccagggcccacccagtctattttttcaaatcagcttgtccacccgccgacccggataatatggaagatgtgctccccttttgcatatgcacgggaaaactgggctttcgcgtcatcacccccctacctagaggccatgctattgtgggaacaagcgcagtacaagggtttgtgtctgtgctgcagaagctcatgggcctaacggcctgcctgcgccgcatgcgtcacaagatcaaagagattggggccccgctttttgacagcggcgtgtatcacgccgggcggtgcatccggctgccgcatacctacaaggtggacaggggcggtggtcttagccggcagctgcgcctctttgtctgtcatccggaagaggaagacaagcacagctatgttaagaatgccctcaacattcaaaacctcttacatcactcactgcacgtgggctggccggcccccaaaaccttctgctaccacatcgcggatgatgggcgtgactatctaatccagaggacccgcgagaccctgccccccaccgtggagaatgtctgcgccatgatagagggacatctgggcctggatctcgtcgcctgggtcagctcctgcatctggccctcgctcatgagcaccctggcaacagctgtgccagaagacaaattcccccagtttctccatgtcacgtttgagcaaaccgggccaaacttagttcaggtgtgccatgcccggggcaggaactttgcgtgcctgaggcatacccacagggccagctccaagaatgtgagggtgtttctggtactctactacacatcacaggccatcacggtcaccttcatgagtcagtgcttcgccggtcgctgtggggccaatcaaccgaccgcccatttctccatcagcgtgcccgcctccagaatcataaatagggctgaggccagtcaagacagcactacatcccagctagcccgtcgtagagacagacaagatggttccttctcagagactctcccgaactag

SEQ ID NO: 15690 - DNA, 2628 bp, unidentified
  source 1..2628: mol_type = other DNA
  misc_feature 1..2628: note = Synthetic
ataatgtccgcccccgtcgtcatcaaggcccttgtggcctcaaacactgacattgcggaggccatcctcgatgccatcctctcgcggcctgacgagggcttccgcctgttttgtttgtgccacaacgcctcgcccctccaccacgtggcgggttctctcgtggaactgcagcttcacctgcccaagaagcggctgacctcacagagccgctgcggcctggttctgacgctgcacctgccggcggaggaggccttccccttcctgcgcggcctcacgccgctcaccgcggaccgtctatccacctacctagatcgcgcgggggccctgcgctcgctcacgcccctcgtggaactgctcacactgagcgctaagaagcagccacagggggatgccagaggccgcgtggcgtggctgcgtcccaagatcgtgggctgtctgcgccgcatctaccgcgttaacatctcggccaggtggttcattagcacctttggctcccacgaggcccagttcgtgctagtcacggctgcttactatttttggggcattccttgtacgattgagaccctggcgcacctcacggagctatttacttccgagtctggtcagagcctggccgccgtcacgtccctggccgagctgggggaggtctttggctcctcggcatgggcggagcagaccgaggcttttgcccactttgcacacgagaagctgcggcgggactcacgagagatccgcgctgtggcaaggacgatagacgcctacagggggcgccttcccctggcctcggccgatctcgtgcgctacgtctatttggcccacgcacagtgcttcaacgagggaacctttaagcgatactctcagttaacgagcgtgggagaaattgggtgtctgccttcggggggcgtcgtgctcccctcgctcctggacaggggctttgcggagcacatgcgcacctacttcacccgggagacttacctggctgagcatgtgcgtgtccagcagctgaaaatccgcatggagcccccggccccatacacgtgggaccccgaccccgatgacggactcatgcgggcttgggccgggctcagtgtggacgtggcccgggagctggtggagctcgcgcgctggcacgcggatgagggtcccacatacccccccacgcttcaagggtttctatgcttggccggccaggccacctgccggggccagtggaatcccaaggaacaattcctcccacccaccgtccttcgaagggtgcagcggctaccggtcttcctctgccattttgcagacaggcactactttgtaatgacagccgctgaccccttctcgtcccacctggcggaggtcgtctccaccccgaccaactgccgcctcccagacacgtgtctcaccagggccctctcctacaccccagtgtactattcacagaacagcctgagcgagcagctctttgtctcccggcatgaatactttaatccccggcttccggtctgcaacctggtcctggacctggatctaaagatcaagggggccccctggtcgctggaggaaatctatgacctgtgccggaccgtgcggcgtgaggtactgcgcctcatgcgccgcctgggtccagtgtccagggcccacccagtctattttttcaaatcagcttgtccacccgccgacccggataatatggaagatgtgctccccttttgcatatgcacgggaaaactgggctttcgcgtcatcacccccctacctagaggccatgctattgtgggaacaagcgcagtacaagggtttgtgtctgtgctgcagaagctcatgggcctaacggcctgcctgcgccgcatgcgtcacaagatcaaagagattggggccccgctttttgacagcggcgtgtatcacgccgggcggtgcatccggctgccgcatacctacaaggtggacaggggcggtggtcttagccggcagctgcgcctctttgtctgtcatccggaagaggaagacaagcacagctatgttaagaatgccctcaacattcaaaacctcttacatcactcactgcacgtgggctggccggcccccaaaaccttctgctaccacatcgcggatgatgggcgtgactatctaatccagaggacccgcgagaccctgccccccaccgtggagaatgtctgcgccatgatagagggacatctgggcctggatctcgtcgcctgggtcagctcctgcatctggccctcgctcatgagcaccctggcaacagctgtgccagaagacaaattcccccagtttctccatgtcacgtttgagcaaaccgggccaaacttagttcaggtgtgccatgcccggggcaggaactttgcgtgcctgaggcatacccacagggccagctccaagaatgtgagggtgtttctggtactctactacacatcacaggccatcacggtcaccttcatgagtcagtgcttcgccggtcgctgtggggccaatcaaccgaccgcccatttctccatcagcgtgcccgcctccagaatcataaatagggctgaggccagtcaagacagcactacatcccagctagcccgtcgtagagacagacaagatggttccttctcagagactctcccgaactag

SEQ ID NO: 15691 - DNA, 156 bp, unidentified; identical to SEQ ID NO: 8948
  source 1..156: mol_type = other DNA
  misc_feature 1..156: note = Synthetic

SEQ ID NO: 15692 - DNA, 156 bp, unidentified; identical to SEQ ID NO: 8948
  misc_feature 1..156: note = Synthetic
  source 1..156: mol_type = other DNA

SEQ ID NO: 15693 - DNA, 117 bp, unidentified; identical to SEQ ID NO: 12835
  source 1..117: mol_type = other DNA
  misc_feature 1..117: note = Synthetic

SEQ ID NO: 15694 - DNA, 117 bp, unidentified; identical to SEQ ID NO: 12835
  misc_feature 1..117: note = Synthetic
  source 1..117: mol_type = other DNA

SEQ ID NO: 15695 - DNA, 75 bp, unidentified; identical to SEQ ID NO: 8955
  source 1..75: mol_type = other DNA
  misc_feature 1..75: note = Synthetic

SEQ ID NO: 15696 - DNA, 45 bp, unidentified
  misc_feature 1..45: note = Synthetic
  source 1..45: mol_type = other DNA
atcgcaggctgcaggctgtgcccgctggacgagaaaggtttttaa

SEQ ID NO: 15697 - DNA, 222 bp, unidentified
  source 1..222: mol_type = other DNA
  misc_feature 1..222: note = Synthetic
atgtctatgggggccctgaccgacctggggcaaaacatgctgtacgccaactccgcccacgcgctcgacatgacttttgaggtggaccccatggatgagcccacacttctctatgttctgttcgaagttttcgacgttgtgcgcatccaccagccgcaccgcggcgtcatcgaggccgtctacctgcgtacgccgttctcggccggtaacgccaccacataa

SEQ ID NO: 15698 - DNA, 426 bp, unidentified
  misc_feature 1..426: note = Synthetic
  source 1..426: mol_type = other DNA
gtgagggaaataaccaggatcaccacccccaccaccaggaccagaatgagcatgccgccgaaggggtttttgaagaaggagatgaaacccgagaccaggctgctaaacaaaccccccaccgtgctgactaggccggcgatgttttgcgcctggaagttgtactcccggaagatgccctccaggtcaaagacgttggaggcacgctgttcgtcccgccctccgtgtgattctcccgcgtgccaaacgagggacactggatgtccgaggagaagcggaacaggtcgccgtggctggagagctcgcagactcggaaaggaaagctggtttgctgacgcgtggcggatggcccggtactgggggtgcgccgtgaaggcggcggcgcagtccgccttcagcgcctccaccgcgtcgcccgaggagctgtag

SEQ ID NO: 15699 - DNA, 2082 bp, unidentified
  misc_feature 1..2082: note = Synthetic
  source 1..2082: mol_type = other DNA
atgtcggctcgcgaacccgcggggcgcaggaggcgcgcatccacccgcccccgcgcctcgcccgtggcggacgagccagcgggcgatggggtggggttcatggggtacctgcgtgcggtgttccgcggggatgacgacagcgagctagaggctctggaggagatggcgggcgacgagccgcccgtgcgccgtcgacgggaaggcccgcgagcccgacgacggcgcgcgtcggaagccccgcccacatcccatcgccgagcgtcccggcagcgccccgggcccgatgcggcccgtagccagtcggtgcgcggtcgcctggacgatgatgatgaggttccccgcggtcctccgcaggcccggcaggggggatacctgggtcccgtcgacgcgcgggctattttggggcgggtcggcggttcgcgggtggcgccgtcgccgctgttcctagaggagctgcagtacgaggaggacgactacccggaagccgtcgggccggaggacggcggcggggcccgttccccgcccaaggtggaggttctggagggacgcgtgccgggcccggagctccgggcggcattcccgttggatcgactggcccctcaggttgccgtgtgggacgagtccgtgcgctccgccctagccctggggcatccggccgggttttacccgtgtccggatagcgcgttcgggttatcgcgcgtgggggtcatgcacttcgcctcccccgacaaccccgcggtgtttttccgccaaaccctgcagcagggcgaggcgttggcctggtatatcacgggcgatgggattcttgacctgacggatcgtcgaacaaaaaccagccccgcccaggcgatgagctttttggcggatgccgtcgtgcggctggccatcaacgggtgggtgtgcgggacgcgccttcacgcggaggcgcgcgggtctgacctggacgacagggcggccgagctgaggcggcagttcgcgagcctcacggcgttgcgtcccgtcggggccgcggccgtgccgttactgagcgcgggggggttagtgtccccccaatccggccccgacgccgcggtgttccgcagctcgctggggtccctgctgtactggcccggggtgcgcgcgctgctggaccgcgactgtcgcgtggccgcccgctatgccggccgcatgacgtacctggccaccggggccctgctcgcccgcttcaatcccgacgccgtccggtgcgttttgacgcgggaggccgccttcctggggcgcgtgctggatgtgctggcggtgatggcggagcagacggtccagtggctctcggtggtcgtgggggcgcgcctgcacccgcacgtgcaccaccccgcctttgcggacgtggcgcgggaggagctgtttcgcgccctgcccctgggaagccccgcggtcgtgggggccgagcacgaggcgctgggcgacaccgcagcgcgccggctgctcgccaacagcgggctcaacgccgtgctgggcgctgcggtgtacgcgctgcacacggccctggcgaccgtgaccttaaagtacgcccgggcgtgcggggacgcgcaccggcgccgggacgacgcggcggccacgcgcgccattctggccgccgggctcgtcctgcagcggctgctgggctttgccgacaccgtggtggcgtgcgtgacactggccgcgtttgacgggggattcacggcccccgaggtgggcacgtacacccccctgcgctacgcgtgcgtcctccgagcgacccagcccctgtacgcgcgcaccacccccgccaagttctgggcggacgtccgcgcggccgcggagcacgtggatctgcgccccgcctcctcagcgccccgggcccccgtgtccgggacggcagaccccgcctttcttctcaaggacctggagcccttcccccccgcccccgtaagcggcgggtccgtgttgggcccgcgggtccgcgtggtggacatcatgtcccagtttaggaaactgctgatgggagacgagggggccgccgccctgcgggcgcacgtgtcggggaggcgcgcgaccgggctgggaggcccgccacgcccataa

SEQ ID NO: 15700 - DNA, 195 bp, unidentified; identical to SEQ ID NO: 8961
  misc_feature 1..195: note = Synthetic
  source 1..195: mol_type = other DNA

SEQ ID NO: 15701 - DNA, 2052 bp, unidentified
  misc_feature 1..2052: note = Synthetic
  source 1..2052: mol_type = other DNA
ctgtatatctatccatttatcatggaaaagaatttacccgatatcttcttttttccaaactgcgttaatgtattctcttacaaatattcacaagatgaattcagtaacatgagcaaaacggaacgtgcaagtttctcattggcagtgtttccagtgataaaacatagatggcataacgcacacgttgtaaaacataaaggaatatacaaagttagtgcagaagcacgtggagaaaaagtatctcctccatcactaggaaaacctgtttacataaacctaactacgaggcaatatatatacagtgagtatgcaataagctttgaatgttatagttttctaaaatgtataacaaatacagaaatcaattcgttcgatgattatatattaagaggactattggaagcgggtaatagtttacagatattttccaattctgtgggtaaacggatagatactgtaggtgtactagggaacaagtatccgtttagtaaaattccattggcctcattaactccgaaagcacaacgagagatattttcagcgtggatttctcatagacctgtagttttaactggaggaaccggagtgggtaagacgtcacaggtacccaagttattgctttggtttaattatttatttgggggattctctactctagataaaatcactgactttcacgaaagaccagtcattctatctcttcctaggatagctttagttagattgcatagcaataccattttaaaatcattgggatttaaggtactaaatggatctcctatttctttacggtacggatctataccggaagaattaataaacaaacaaccaaaaaaatatggaattgtattttctacccataagttatctctaacaaaactatttagttatggcactcttattatagacgaagttcatgagcatgatcaaataggagatattattatagcagtagcgagaaagcatcatacgaaaatagattctatgtttttaatgactgccacattagaggatgacagagaacgtctaaaagtatttttacccaatcccgcatttatacatattcctggagatacactgtttaaaattagcgaggtatttattcataataagataaatccatcttccagaatggcatacatagaagaagaaaagagaaatttagttactgctatacagatgtatactcctcctgatggatcatccggcatagtcttcgtggcatccgttgctcaatgtcatgaatataaatcatatttagaaaagagattgccgtacgatatgtatattattcatggtaaggtcttagatatagacgaaatattagagaaagtgtattcatcacctaacgtatcgataattatttctactccttatttggaatccagcgttactatacgcaatgttacacacatttatgatatgggtagagtttttgttcctgctccttttggaggatcgcaacaatttatttctaaatctatgagagatcaacgaaaaggaagagtaggaagagttaatcctgggacatacgtctatttctatgatctgtcatacatgaagtctatacagcgaatagattcagaatttctacataattatatattatacgctaataagtttaatctaacactccccgaagatttgtttataattcctacaaatttggatgttctgtggcgtacaaaggaatatatagactcgttcgatattagtacagaaacatggaataaattattatccaattattatatgaagataatagagtatgcgaaactttatgtactaagtcctattctcgctgaggagttggataactttgagagaactggagaattaactagtacggtaaaagaagccattttatctctaaatttacgaattaagattttaaattttaaacataaagatgaggatacgtatatacacttttgtagagtattatttggtgtctataacggaacaaacgctactatatattatcatcgccctctaactggatatatgaatatgatttcagatactatatttgttcctgtagataataactaa

SEQ ID NO: 15702 - DNA, 45 bp, unidentified; identical to SEQ ID NO: 8963
  source 1..45: mol_type = other DNA
  misc_feature 1..45: note = Synthetic

SEQ ID NO: 15703 - DNA, 2052 bp, unidentified
  misc_feature 1..2052: note = Synthetic
  source 1..2052: mol_type = other DNA
ctgtatatctttccatttatcatggaaaagaatttaccagatatcttcttttttccaaactgcgttaatgtattctcttacaaatattcacaagatgaattcagtaatatgagtaaaacggaacgtgataatttctcattggctgtgtttccagtgataaaacatagatggcataacgcacacgttgtaaaacataaaggaatatacaaagttagtacagaagcacgtggaaaaaaagtatctcctccatcactaggaaaacccgcacatataaacctaatgtcgaagcaatatatatatagtgagtatgcaataagctttgaatgttatagttttctaaaatgtataacaaatacagaaatcaattcgttcgatgagtatatattaagaggactattagaagctggtaatagtttacagatattttccaattccgtaggcaaacgaatagatactataggtgtactagggaataagtatccatttagcaaaattccattggcctcattaactcctaaagcacaacgagagatatttttagcgtggatttctcatagacctgtagttttaactggaggaaccggagtgggtaagacgtcacaggtacccaagttattgctttggtttaattatttatttggtggattctctactctagataaaatcactgactttcacgaaagaccagtcattctatctcttcctaggatagctttagttagattgcatagcaataccattttaaaatcattgggatttaaggtactagatggatctcctatctctttacggtacggatctataccggaagaattaataaacaaacaaccaaaaaaatatggaattgtattttctacccataagttatctctaacaaaactatttagttatggcactattattatagacgaagttcatgagcatgatcaaataggagatattattatagcagtagcgagaaagcatcatacgaaaatagattctatgtttttaatgactgccacgttagaggatgacagggaacgtctaaaaatatttttacctaatcccgcatttatacatattcctggagatacactgtttaaaattagcgaggtatttattcataataagataaatccatcttccagaatggcatatatagaagaagaaaagagaaatttagttaccgctatacagatgtatactcctcctgatggatcatccggtatagtctttgtggcatccgttgcacagtgtcacgaatataaatcatatttagaaaaaagattaccgtatgatatgtatattattcatggtaaggtcttagatatagacgaaatattagaaaaagtgtattcatcacctaatgtatcgataattatttctactccttatttggaatccagcgttactatacgcaatgttacacacatttatgatatgggtagagtttttgtccccgctccttttggaggatcacaacaatttatttctaaatctatgagagatcaacgaaaaggaagagtaggaagagttaatcctggaacatacgtatatttctatgatctgtcttatatgaagtctatacagcgaatagattcagaatttctacataattatatattgtacgctaataagtttaatctaacactccccgaagatttgtttataatccctacaaatttggatattctatggcgtacaaaggaatatatagactcgttcgatattagtacagaaacatggaataaattattatccaattattatatgaagatgatagagtatgctaaactttatgtactaagtcctattctcgctgaggagttggataactttgagaggacgggagaattaactagtattgtacaagaagccattttatctctaaatttacgaattaagattttaaaatttaaacataaagatgatgatacgtatatacacttttgtagaatattattcggcgtctataacggaacaaacgctactatatattatcatagacctctaacgggatatatgaatatgatttcagatactatatttgttcctgtagataataactaa

SEQ ID NO: 15704 - DNA, 45 bp, unidentified; identical to SEQ ID NO: 8966
  source 1..45: mol_type = other DNA
  misc_feature 1..45: note = Synthetic

SEQ ID NO: 15705 - DNA, 204 bp, unidentified
  misc_feature 1..204: note = Synthetic
  source 1..204: mol_type = other DNA
atccgcgagttcgtggccaaggtggtatccgtcgcgatggaggccactggaacgacggcgccctccataaaggtgcacgaccgcgtggagacagagatccgcgagtgctcggagtcgggagaggttcccttctgcaccatcgggctcgtgctgcgcacggtgcttgcgatcctcgagtcgcttctgggcgatggaggcgattaa

SEQ ID NO: 15706 - DNA, 144 bp, unidentified; identical to SEQ ID NO: 8976
  misc_feature 1..144: note = Synthetic
  source 1..144: mol_type = other DNA

SEQ ID NO: 15707 - DNA, 2220 bp, unidentified
  source 1..2220: mol_type = other DNA
  misc_feature 1..2220: note = Synthetic
atggattctcgtcctcagaaaatctggatggcgccgagtctcactgaatctgacatggattaccacaagatcttgacagcaggtctgtccgttcaacaggggattgttcggcaaagagtcatcccagtgtatcaagtaaacaatcttgaagaaatttgccaacttatcatacaggcctttgaagcaggtgttgattttcaagagagtgcggacagtttccttctcatgctttgtcttcatcatgcgtaccagggagattacaaacttttcttggaaagtggcgcagtcaagtatttggaagggcacgggttccgttttgaagtcaagaagcgtgatggagtgaagcgccttgaggaattgctgccagcagtatctagtggaaaaaacattaagagaacacttgctgccatgccggaagaggagacaactgaagctaatgccggtcagtttctctcctttgcaagtctattccttccgaaattggtagtaggagaaaaggcttgccttgagaaggttcaaaggcaaattcaagtacatgcagagcaaggactgatacaatatccaacagcttggcaatcagtaggacacatgatggtgattttccgtttgatgcgaacaaattttctgatcaaatttctcctaatacaccaagggatgcacatggttgccgggcatgatgccaacgatgctgtgatttcaaattcagtggctcaagctcgtttttcaggcttattgattgtcaaaacagtacttgatcatatcctacaaaagacagaacgaggagttcgtctccatcctcttgcaaggaccgccaaggtaaaaaatgaggtgaactcctttaaggctgcactcagctccctggccaagcatggagagtatgctcctttcgcccgacttttgaacctttctggagtaaataatcttgagcatggtcttttccctcaactatcggcaattgcactcggagtcgccacagcacacgggagtaccctcgcaggagtaaatgttggagaacagtatcaacaactcagagaggctgccactgaggctgagaagcaactccaacaatatgcagagtctcgcgaacttgaccatcttggacttgatgatcaggaaaagaaaattcttatgaacttccatcagaaaaagaacgaaatcagcttccagcaaacaaacgctatggtaactctaagaaaagagcgcctggccaagctgacagaagctatcactgctgcgtcactgcccaaaacaagtggacattacgatgatgatgacgacattccctttccaggacccatcaatgatgacgacaatcctggccatcaagatgatgatccgactgactcacaggatacgaccattcccgatgtggtggttgatcccgatgatggaagctacggcgaataccagagttactcggaaaacggcatgaatgcaccagatgacttggtcctattcgatctagacgaggacgacgaggacactaagccagtgcctaatagatcgaccaagggtggacaacagaagaacagtcaaaagggccagcatatagagggcagacagacacaatccaggccaattcaaaatgtcccaggccctcacagaacaatccaccacgccagtgcgccactcacggacaatgacagaagaaatgaaccctccggctcaaccagccctcgcatgctgacaccaattaacgaagaggcagacccactggacgatgccgacgacgagacgtctagccttccgcccttggagtcagatgatgaagagcaggacagggacggaacttccaaccgcacacccactgtcgccccaccggctcccgtatacagagatcactctgaaaagaaagaactcccgcaagacgagcaacaagatcaggaccacactcaagaggccaggaaccaggacagtgacaacacccagtcagaacactcttttgaggagatgtatcgccacattctaagatcacaggggccatttgatgctgttttgtattatcatatgatgaaggatgagcctgtagttttcagtaccagtgatggcaaagagtacacgtatccagactcccttgaagaggaatatccaccatggctcactgaaaaagaggctatgaatgaagagaatagatttgttacattggatggtcaacaattttattggccggtgatgaatcacaagaataaattcatggcaatcctgcaacatcatcagtga

SEQ ID NO: 15708 - DNA, 2052 bp, unidentified
  source 1..2052: mol_type = other DNA
  misc_feature 1..2052: note = Synthetic
ctgtatatctttccatttatcatggaaaagaatttaccagatatcttcttttttccaaactgcgttaatgtattctcttacaaatattcacaagatgaattcagtaatatgagtaaaacggaacgtgatagtttctcattggccgtgtttccagttataaaacatagatggcataacgcacacgttgtaaaacataaaggaatatacaaagttagtacagaagcacgtggaaaaaaagtatctcctccatcactaggaaaacccgcacacataaacctaaccgcgaagcaatatatatacagtgaacacacaataagctttgaatgttatagttttctaaaatgtataacaaatacagaaatcaattcgttcgatgagtatatattaagaggactattagaagctggtaatagtttacagatattttccaattccgtaggtaaacgaacagatactataggtgtactagggaataagtatccatttagcaaaattccattggcctcattaactcctaaagcacaacgagagatattttcagcgtggatttctcatagacctgtagttttaactggaggaactggagtgggtaagacgtcacaggtacccaagttattgctttggtttaattatttatttggtggattctctactctagataaaatcactaactttcacgaaagaccagtcattctatctcttcctaggatagctttagttagattgcatagcaataccattttaaaatcattgggatttaaggtactagatggatctcctatttctttacggtacggatctataccggaagaattaataaacaaacaaccaaaaaaatatggaattgtattttctacccataagttatctctaacaaaactatttagttatggcactcttattatagacgaagttcatgagcatgatcaaataggagatattattatagcagtagcgagaaagcatcatacgaaaatagattctatgtttttaatgactgccacgttagaggatgaccgagaacggctaaaagtatttttacctaatcccgcatttatacatattcctggagatacactgtttaaaattagcgaggtatttattcataataagataaatccatcttccagaatggcatacatagaagaagaaaagagaaatttagttactgctatacagatgtatactcctcctgatggatcatccggtatagtctttgtggcatccgttgcacagtgtcacgaatataaatcatatttagaaaaaagattaccgtatgatatgtatattattcatggtaaggtcttagatatagacgaaatattagaaaaagtgtattcatcacctaatgtatcgataattatttctactccttatttggaatccagcgttactatacgcaatgttacacacatttatgatatgggtaaagtttttgtccccgctccttttggaggatcgcaagaatttatttctaaatctatgagagatcaacgaaaaggaagagtaggaagagttaatcctggtacatacgtctatttctatgatctgtcttatatgaagtctatacagcgaatagattcagaatttctacataattatatattgtacgctaataagtttaatctaacactccccgaagatttgtttataatccctacaaatttggatattctatggcgtacaaaggaatatatagactcgttcgatattagtacagaaacatggaataaattattatccaattattatatgaagatgatagagtatgctaaactttatgtactaagtcctattctcgctgaggagttggataactttgagaggacgggagaattaactagtattgtacgagaagccattttatctctaaatttacgaattaagattttaaattttaaacataaagatgatgatacgtatatacacttttgtaaaatattattcggtgtctataacggaacaaacgctactatatattatcatagacctctaacgggatatatgaatatgatttcagatactatatttgttcctgtagataataactaa

SEQ ID NO: 15709 - DNA, 45 bp, unidentified; identical to SEQ ID NO: 8966
  source 1..45: mol_type = other DNA
  misc_feature 1..45: note = Synthetic

SEQ ID NO: 15710 - DNA, 2052 bp, unidentified
  source 1..2052: mol_type = other DNA
  misc_feature 1..2052: note = Synthetic
ctgtatatctttccatttatcatggaaaagaatttaccagatatcttcttttttccaaactgcgttaatgtattctcttacaaatattcacaagatgaatttagtaatatgagtaacatggaacgtgatagtttctctttggcggtgtttccagttataaaacatagatggcataacgcacacgttgtaaaacataaaggaatatacaaagttagtacagaagcacatggaaaaaaagtatctcctccatcactaggaaaaccctcacacataaacctaaccgcgaagcaatatatatacagtgaacacacaataagctttgaatgttatagttttctaaaatgtataacaaatgcagaaattaattcgttcgatgagtatatattaagaggactattagaagctggtaatagtttacagatattttccaattccgtaggtaaacgaacagatactataggtgtactagggaataagtatccatttagcaaaattccattggcctcattaactcctaaagcacaacgagagatattttcagcatggatttctcatagacccgtagttttaactggaggaaccggagtgggtaagacgtcacaggtacccaagttattgctttggtttaattatttatttggtggattctctactctagataaaatcactgactttcacgaaagaccagtcattctatctcttcctaggatagctttagttagattgcatagcaataccattttaaaatcattgggatttaaggtactagatggatctcctatttctttacggtacggatctataccggaagaattaataaacaaacaaccaaaaaaatatggaattgtattttctacccataagttatctctaacaaaactatttagttatggcactcttattatagacgaagttcatgagcatgatcaaataggagatattattatagcagtagcgagaaagcatcatacgaaaatagattctatgtttttaatgactgccacgttagaggatgacagggaacggctaaaagtatttttacctaatcccgcatttatacatattcctggagatacactgtttaaaattagcgaggtatttattcataataagataaatccatcttccagaatggcatacatagaagaagaaaagagaaatttagttactgctatacagatgtatactcctcctgatggatcatctggtatagtctttgtggcatccgttgcacagtgtcacgaatataaatcatatttagaaaaaagattaccgtatgatatgtatattattcatggtaaggtcttagaaatagacaaaatattagaaaaagtgtattcatcgcctaatgtatcgataattatttctgctccttatttggaatccagcgttactatacacaatgttactcacatttatgatatgggtagagtttttgttcccgctccttttggaggatcacaacaatttatttctaaatctatgagagatcaacgaaaaggaagagtaggaagagttaatcctggtacatacgtctatttctatgatctgtcttatatgaagtctatacagcgaataaattcagaatttctacataattatatattgtacgctaataagtttaatttaacacttcccgaagatttgtttataatccctacaaatttggatattctatggcgtacaaaggaatatatagactcgttcgatattagtacagaaacatggaataaattattatccaattattatatgaagatgatagagtatgctaaactttatgtactaagtcctattctcgctgaggagttggataactttgagaggacgggagaattaactagtattgtacaagaagccattttatctctaaatttacgaattaagattttaaattttaaacataaagataatgatacgtatatacacttttgtaaaatattatttggtgtctataacggaacaaacgctactatatattatcatagacctctaacgggatatatgaatatgatttcagatactatatttgttcctgtagataataactaa

SEQ ID NO: 15711 - DNA, 18 bp, unidentified
  misc_feature 1..18: note = Synthetic
  source 1..18: mol_type = other DNA
ataattagattaccctga

SEQ ID NO: 15712 - DNA, 18 bp, unidentified
  misc_feature 1..18: note = Synthetic
  source 1..18: mol_type = other DNA
ataattagattaccctga

SEQ ID NO: 15713 - DNA, 18 bp, unidentified
  source 1..18: mol_type = other DNA
  misc_feature 1..18: note = Synthetic
ataattagattaccctga

SEQ ID NO: 15714 - DNA, 1494 bp, unidentified
  source 1..1494: mol_type = other DNA
  misc_feature 1..1494: note = Synthetic
ctgatgtcagattataatcctgatgtcctccagcagcttgtcaaggatggaatcaagactatcgagcttttacagcagagtccggaagactttcagaagacgtacggcagaagtgccatccaggagccgtcgacaagagccagaatccaaagttgggagtcccgcaatcccgatcatgattacaccggtaataaaaatcagagaagcgagggagctaaagagagagcaaacaagagcgagagcgcgggaactgcttcagctgatggaggacatggagataaaccctcaaataacgggggtgactcccaaaacgagtaccaagggtcagatcaacaggtatgggatgctgcgtataatgatgggaatagtggcggagcttggggaggtcccacaggtggacttcccacggctggagaaagagggtatcctatcacaacaggaaatcaagaatttgagggataccatcccgacggtccagttgatgctcgagagtataatcagataagctccatggatcatgagatgtctgctgcagaaactttgggctcgtctactcagctaactactatgagaaacgcaacaactgatgattttgcgaaaatttttgaggaggggacacctaaagtgcaccgacggctgagggggataactgctgttgtgccggctcaaaagcaaccaggggcagtcggtggacctgttaaaaaaggcaccgacgggagtactgcatcgacacttttgggggacgtaccattatccgggagtggtgcaatccccaatgtgcacccctcactgttacaccaacccaaaaagaatgctcatgcggagaatgcccaaggcagtgtgcaagatgtatcgacgaccggggctattggccaaagtgacgaggctgcacactttgatcaggagattgaaggaaaactcaatcttgtgcttaaggaattagatctgatcagtaagaagctagactatctaccggagatcaaagaggagatcaggaatattaataagaaaataaccaatcttagcctaggactctctacagttgaaaactatatcaaatccatgatgatcattatccctagctcaggaaagcctgatgtgaatgacacggctgaggtgaatccagatctgaaggcagtaattgggagagataaaactagggggttgaaggaagttacaacacacaggagtgatctagaaagtttagacctcctaagcccagcaacatcagaaatagaccctaaatacctgactcaagacctggatttcactaagtctaatgccgccaattttgtcccaggcaatgatgccagctcattttataccattgtggctatgatcaagggtgaagtaactgatgtcaaacgtcagcaagagttgatcaagtgggtgtctgactccatgaacaaacaccccatgggacagatctaccgtgtcgtgagggaggctctggatgctgaaagtgacagctcctcaagctcagatagtgattag

SEQ ID NO: 15715 - DNA, 1143 bp, unidentified
  misc_feature 1..1143: note = Synthetic
  source 1..1143: mol_type = other DNA
ctgatgtcagattataatcctgatgtcctccagcagcttgtcaaggatggaatcaagactatcgagcttttacagcagagtccggaagactttcagaagacgtacggcagaagtgccatccaggagccgtcgacaagagccagaatccaaagttgggagtcccgcaatcccgatcatgattacaccggtaataaaaatcagagaagcgagggagctaaagagagagcaaacaagagcgagagcgcgggaactgcttcagctgatggaggacatggagataaaccctcaaataacgggggtgactcccaaaacgagtaccaagggtcagatcaacaggtatgggatgctgcgtataatgatgggaatagtggcggagcttggggaggtcccacaggtggacttcccacggctggagaaagagggtatcctatcacaacaggaaatcaagaatttgagggataccatcccgacggtccagttgatgctcgagagtataatcagataagctccatggatcatgagatgtctgctgcagaaactttgggctcgtctactcagctaactactatgagaaacgcaacaactgatgattttgcgaaaatttttgaggaggggacacctaaagtgcaccgacggctgagggggataactgctgttgtgccggctcaaaagcaaccaggggcagtcggtggacctgttaaaaaaggcaccgacgggagtactgcatcgacacttttgggggacgtaccattatccgggagtggtgcaatccccaatgtgcacccctcactgttacaccaacccaaaaagaatgctcatgcggagaatgcccaaggcagtgtgcaagatgtatcgacgaccggggctattggccaaagtgacgaggctgcacactttgatcaggagattgaaggaaaactcaatcttgtgcttaaggaattagatctgatcagtaagaagctagactatctaccggagatcaaagaggagatcaggaatattaataagaaaataaccaatcttagcctaggactctctacagttgaaaactatatcaaatccatgatgatcattatccctagctcaggaaagcctgatgtgaatgacacggctgaggtgaatccagatctgaaggcagtaatt

SEQ ID NO: 15716 - DNA, 1080 bp, unidentified
  misc_feature 1..1080: note = Synthetic
  source 1..1080: mol_type = other DNA
ctgatgtcagattataatcctgatgtcctccagcagcttgtcaaggatggaatcaagactatcgagcttttacagcagagtccggaagactttcagaagacgtacggcagaagtgccatccaggagccgtcgacaagagccagaatccaaagttgggagtcccgcaatcccgatcatgattacaccggtaataaaaatcagagaagcgagggagctaaagagagagcaaacaagagcgagagcgcgggaactgcttcagctgatggaggacatggagataaaccctcaaataacgggggtgactcccaaaacgagtaccaagggtcagatcaacaggtatgggatgctgcgtataatgatgggaatagtggcggagcttggggaggtcccacaggtggacttcccacggctggagaaagagggtatcctatcacaacaggaaatcaagaatttgagggataccatcccgacggtccagttgatgctcgagagtataatcagataagctccatggatcatgagatgtctgctgcagaaactttgggctcgtctactcagctaactactatgagaaacgcaacaactgatgattttgcgaaaatttttgaggaggggacacctaaagtgcaccgacggctgagggggataactgctgttgtgccggctcaaaagcaaccaggggcagtcggtggacctgttaaaaaaggcaccgacgggagtactgcatcgacacttttgggggacgtaccattatccgggagtggtgcaatccccaatgtgcacccctcactgttacaccaacccaaaaagaatgctcatgcggagaatgcccaaggcagtgtgcaagatgtatcgacgaccggggctattggccaaagtgacgaggctgcacactttgatcaggagattgaaggaaaactcaatcttgtgcttaaggaattagatctgatcagtaagaagctagactatctaccggagatcaaagaggagatcaggaatattaataagaaaataaccaatcttagcctaggactctctacagttgaaaactatatcaaatccatgatgatcattatccct

SEQ ID NO: 15717 - DNA, 483 bp, unidentified; identical to SEQ ID NO: 14645
  misc_feature 1..483: note = Synthetic
  source 1..483: mol_type = other DNA

SEQ ID NO: 15718 - DNA, 483 bp, unidentified; identical to SEQ ID NO: 14645
  misc_feature 1..483: note = Synthetic
  source 1..483: mol_type = other DNA

SEQ ID NO: 15719 - DNA, 483 bp, unidentified; identical to SEQ ID NO: 14645
  misc_feature 1..483: note = Synthetic
  source 1..483: mol_type = other DNA

SEQ ID NO: 15720 - DNA, 183 bp, unidentified; identical to SEQ ID NO: 8986
  source 1..183: mol_type = other DNA
  misc_feature 1..183: note = Synthetic

SEQ ID NO: 15721 - DNA, 36 bp, unidentified; identical to SEQ ID NO: 8989
  misc_feature 1..36: note = Synthetic
  source 1..36: mol_type = other DNA

SEQ ID NO: 15722 - DNA, 21 bp, unidentified
  misc_feature 1..21: note = Synthetic
  source 1..21: mol_type = other DNA
atgtgtataccgccccattaa

SEQ ID NO: 15723 - DNA, 372 bp, unidentified
  misc_feature 1..372: note = Synthetic
  source 1..372: mol_type = other DNA
atagttaaattactaagcatgaggactctacttattagatatattctttggagaaatgatggcgatccatcatattataatgatgattttgaaaagcttatgttgttggatgaattggtagatgacagtgatgtatgtacattgattaagaacatgagaatgacactgtccgacggtccattgctagatagattaaatcaaccagttaataatgtagaagatgttaagcgaatgatcgctattagtgccaaagtggctagagacattggtgaacgtccagaaattagatgggaagagtcatttaccatactctttaggatgattgaaacatattttgatgatctaatgattgatctatatggtgaaaaataa

SEQ ID NO: 15724 - DNA, 1767 bp, unidentified
  misc_feature 1..1767: note = Synthetic
  source 1..1767: mol_type = other DNA
attttcgctctccgcctctcgcagatggacccgtactgcccatttgacgctctggacgtctgggaacacaggcgcttcatagtcgccgattcccgaaacttcatcacccccgagttcccccgggacttttggatgtcgcccgtctttaacctcccccgggagacggcggcggagcaggtggtcgtcctacaggcccagcgcacagcggctgccgctgccctggagaacgccgccatgcaggcggccgagctccccgtcgatatcgagcgccggttacgcccgatcgaacggaacgtgcacgagatcgcaggcgccctggaggcgctggagacggcggcggccgccgccgaagaggcggatgccgcgcgcggggatgagccggcgggtgggggcgacgggggggcgcccccgggtctggccgtcgcggagatggaggtccagatcgtgcgcaacgacccgccgctacgatacgacaccaacctccccgtggatctgctacacatggtgtacgcgggccgcggggcgaccggctcgtcgggggtggtgttcgggacctggtaccgcactatccaggaccgcaccatcacggactttcccctgaccacccgcagtgccgactttcgggacggccgtatgtccaagaccttcatgacggcgctggtactgtccctgcaggcgtgcggccggctgtatgtgggccagcgccactattccgccttcgagtgcgccgtgttgtgtctctacctgctgtaccgaaacacgcacggggccgccgacgatagcgaccgcgctccggtcacgttcggggatctgctgggccggctgccccgctacctggcgtgcctggccgcggtgatcgggaccgagggcggccggccacagtaccgctaccgcgacgacaagctccccaagacgcagttcgcggccggcgggggccgctacgaacacggagcgctggcgtcgcacatcgtgatcgccacgctgatgcaccacggggtgctcccggcggccccgggggacgtcccccgggacgcgagtacccacgttaaccccgacggcgtggcgcaccacgacgacataaaccgcgccgccgccgcgttcctcagccggggccacaacctattcctgtgggaggaccagactctgctgcgggcaaccgcgaacaccataacggccctgggcgttatccagcggctcctcgcgaacggcaacgtgtacgcggaccgcctcaacaaccgcctgcagctgggcatgctgatccccggagccgtcccttcggaggccatcgcccgtggggcctccgggtccgactcgggggccatcaagagcggagacaacaatctggaggcgctatgtgccaattacgtgcttccgctgtaccgggccgacccggcggtcgagctgacccagctgtttcccggcctggccgccctgtgtcttgacgcccaggcggggcggccggtcgggtcgacgcggcgggtggtggatatgtcatcgggggcccgccaggcggcgctggtgcgcctcaccgccctggaactcatcaaccgcacccgcacaaaccccacccctgtgggggaggttatccacgcccacgacgccctggcgatccaatacgaacaggggcttggcctgctggcgcagcaggcacgcattggcttgggctccaacaccaagcgtttctccgcgttcaacgttagcagcgactacgacatgttgtactttttatgtctggggttcattccacagtacctgtcggcggtttag

SEQ ID NO: 15725 - DNA, 513 bp, unidentified
  source 1..513: mol_type = other DNA
  misc_feature 1..513: note = Synthetic
attcccgaaacttcatcacccccgagttcccccgggacttttggatgtcgcccgtctttaacctcccccgggagacggcggcggagcaggtggtcgtcctacaggcccagcgcacagcggctgccgctgccctggagaacgccgccatgcaggcggccgagctccccgtcgatatcgagcgccggttacgcccgatcgaacggaacgtgcacgagatcgcaggcgccctggaggcgctggagacggcggcggccgccgccgaagaggcggatgccgcgcgcggggatgagccggcgggtgggggcgacgggggggcgcccccgggtctggccgtcgcggagatggaggtccagatcgtgcgcaacgacccgccgctacgatacgacaccaacctccccgtggatctgctacacatggtgtacgcgggccgcggggcgaccggctcgtcgggggtggtgttcgggacctggtaccgcactatccaggaccgcaccatcacggactttcccctga

SEQ ID NO: 15726 - DNA, 576 bp, unidentified
  source 1..576: mol_type = other DNA
  misc_feature 1..576: note = Synthetic
atggcagacgctaccacgctctccgtgaacgggctggaactgcagtacgtgcgcgcgcacgagcgcgccagcgtgcgctacgcgcgcgtctccaccgtgtgctttttcttgctggtgctgctggcgagcagcgtgctcttcctctaccagacctccgacaacaacgtgctcgcggagctggcgcgctacgcgcgcatcaagagcgccgtgcgcagctggaagccgctgctgctagccaaggcgcgcatcgagcgcgagcgcggacgcgcgctggccagcacgcgccccgacgtcttcgagttccgctgcctagacttcggccccttcttcgtcccggtgcggctggaccgcgccagcttcctgccgcaggccgtgcgccgcgggcgcggcgacggctggatggtgaacaaggcgtcgcaggtggaccctagcgcgcagcagttctgcgagtttgtgctgcgcaaccacgaggggaacaccatcacgtgcggagccgagatgttcgccgagatcggctacggaggctacttcgagcaagcgcactggtgtggcgccatgctggagctgctgcagtaa

SEQ ID NO: 15727 - DNA, 426 bp, unidentified
  misc_feature 1..426: note = Synthetic
  source 1..426: mol_type = other DNA
atctcttgcgccctctcggtgttggaccaaagactgtggtgggagatccagtattcatcgggtcgtctcacccgagtcctggtctttcatgatgagggtgaggagggtgatgacgtacatctcacggatacccatcactgtacttcctgtacacatccctatgtgatttctttggttaccccgctgaccatcaatgccacgctacggctgctgatacgagatgggatgtacgggcggggggagaaagagttgtgcatcgcccatctacccaccctgcgagacatccgcacctgccgtgtcgacgccgacctaggactcctgtacgccgtctgtctgatcctgtcgttcagcatcgtcacggcggccctgtggaaggtagattacgacagatccgttgcggttgtgtccaaaagctataaatcatag

SEQ ID NO: 15728 - DNA, 18 bp, unidentified
  source 1..18: mol_type = other DNA
  misc_feature 1..18: note = Synthetic
atggaaaacggacactag

SEQ ID NO: 15729 - DNA, 2124 bp, unidentified
  misc_feature 1..2124: note = Synthetic
  source 1..2124: mol_type = other DNA
atggacaagttggatctagtcaatgatggcctcgatattattgactttattcagaagaaccaaaaagaaatacaaaagacatacggacgatcaagcatccaacaaccaagtaccaaagacaggacaagagcatgggaggacttcttgcagagcaccagtggagaacatgaacaggctgaggggggaatgcctaagaatgatggaggtactgaaggaagaaatgtggaggatctatccagtgttacttcctcagatggaactattggacaaagagtgtcaaacacccgagcttgggcagaagacccagatgacatacaactggacccaatggttacagacgttgtataccatgatcatggaggagaatgtaccggacatggaccttcttcaagccctgagagagggtggagttatcacatgtcaggaacacacgatgggaatgtacgtgctgtacctgatacaaaggtgttgcccaatgctcccaaaactacagttcctgaagaagttagggaaattgatttaattgggttggaggacaaatttgcatcagcgggattaaatccagctgcagttccctttgtccccaagaatcaatcaaccccaactgaggagcctccagtcatcccggagtattactatggatctgggaggagaggagatctctcaaaatctcctcctagaggtaatgtcaatctggacagcatcaagatttacacttcggacgacgaggatgaaaatcagctggagtatgaggatgagtttgccaaaagctcaagtgaggttgtcattgacactactcctgaggacaatgattctatcaaccaggaggaagtagttggggacccgtctgatcagggtttagagcatcctttccctttggggaaattcccggagaaagaagaaactcctgatgtacgcagaaaggattccctaatgcaggacagttgtaagagaggaggagtaccgaaaagactgcccatgttatctgaagagttcgagtgctccggatcagatgatccaataatacaagaattagaacgagaagggtctcatccaggaggttcattacgtttgagggaaccacctcagtcgtcagggaattccagaaatcaacctgaccgtcagctgaagacaggtgatgcagcatcacccggaggcgtccagagaccaggcacaccgatgcctaaatcaaggatcatgcccattaaaaagggcacagacgcgaagtctcaatatgttgggacggaagacgtgcctgggtcgaagagtggtgcaacccggtatgttcgcggattaccccccaaccaagaaagcaagagtgttactgcggagaatgtccaactgagtgctcccagtgctgtcacgaggaatgaaggacacgaccaggaagttaccagcaacgaagatagtctggatgacaaatatattatgccatcagatgattttgctaacactttcttaccccatgacactgataggttaaattatcatgcagaccatctcaatgattacgatttagagaccttgtgtgaggagtcagtattgatgggcatcgttaacgcaatcaaactcatcaacattgatatgaggttgaatcacattgaggaacagatgaaagagatacccaagatcatcaacaaaatagactccattgatcgagtgttggctaagaccaatactgcattgtcgacaatagaaggacacctagtctcgatgatgatcatgataccagggaaaggcaagggtgaaaggaaagggaaaacaaatccggagctaaaacctgtaattgggagaaatatcctagaacagcaagagttattttcattcgacaatctcaagaatttcagagatgggtcattgactgatgagccctatggaggggtggcccgaataagagatgatttgatcctgcctgaactcaacttcagtgagacaaatgcatcacaatttgttcctttggcagatgatgcatctaaggatgtcgtgagaactatgattaggactcacatcaaggacagagagttgaggtctgagttgatggattatctaaatcgagcagaaacagatgaagaggttcaggaggtggccaatacagtcaatgatattattgatgggaacatctaa

SEQ ID NO: 15730 - DNA, 1374 bp, unidentified
  misc_feature 1..1374: note = Synthetic
  source 1..1374: mol_type = other DNA
atggacaagttggatctagtcaatgatggcctcgatattattgactttattcagaagaaccaaaaagaaatacaaaagacatacggacgatcaagcatccaacaaccaagtaccaaagacaggacaagagcatgggaggacttcttgcagagcaccagtggagaacatgaacaggctgaggggggaatgcctaagaatgatggaggtactgaaggaagaaatgtggaggatctatccagtgttacttcctcagatggaactattggacaaagagtgtcaaacacccgagcttgggcagaagacccagatgacatacaactggacccaatggttacagacgttgtataccatgatcatggaggagaatgtaccggacatggaccttcttcaagccctgagagagggtggagttatcacatgtcaggaacacacgatgggaatgtacgtgctgtacctgatacaaaggtgttgcccaatgctcccaaaactacagttcctgaagaagttagggaaattgatttaattgggttggaggacaaatttgcatcagcgggattaaatccagctgcagttccctttgtccccaagaatcaatcaaccccaactgaggagcctccagtcatcccggagtattactatggatctgggaggagaggagatctctcaaaatctcctcctagaggtaatgtcaatctggacagcatcaagatttacacttcggacgacgaggatgaaaatcagctggagtatgaggatgagtttgccaaaagctcaagtgaggttgtcattgacactactcctgaggacaatgattctatcaaccaggaggaagtagttggggacccgtctgatcagggtttagagcatcctttccctttggggaaattcccggagaaagaagaaactcctgatgtacgcagaaaggattccctaatgcaggacagttgtaagagaggaggagtaccgaaaagactgcccatgttatctgaagagttcgagtgctccggatcagatgatccaataatacaagaattagaacgagaagggtctcatccaggaggttcattacgtttgagggaaccacctcagtcgtcagggaattccagaaatcaacctgaccgtcagctgaagacaggtgatgcagcatcacccggaggcgtccagagaccaggcacaccgatgcctaaatcaaggatcatgcccattaaaaaggggcacagacgcgaagtctcaatatgttgggacggaagacgtgcctgggtcgaagagtggtgcaacccggtatgttcgcggattaccccccaaccaagaaagcaagagtgttactgcggagaatgtccaactgagtgctcccagtgctgtcacgaggaatga

SEQ ID NO: 15731 - DNA, 498 bp, unidentified; identical to SEQ ID NO: 12369
  misc_feature 1..498: note = Synthetic
  source 1..498: mol_type = other DNA

SEQ ID NO: 15732 - DNA, 498 bp, unidentified; identical to SEQ ID NO: 12369
  source 1..498: mol_type = other DNA
  misc_feature 1..498: note = Synthetic

SEQ ID NO: 15733 - DNA, 354 bp, unidentified
  misc_feature 1..354: note = Synthetic
  source 1..354: mol_type = other DNA
atgaggactctacttattagatatattctttggagaaatgatggcgatccatcctattataatgatgattttaaaaatcttatgtcgttggatgaattggtagatgacggcgatgtatgtgcattgattaagaacatgagaatgacactgtctgacggtccattgctagatagattgaatcaaccagttaataatatagaagatgctaagcgaatgatcgctattagtgccaaagtggctagagacattggtgaacgttcagaaattagatgggaagattcgttcgccatactctttaggatgattgaaaagtattttgatgatctaatgattgatctatatggtgaaaaataa

SEQ ID NO: 15734 - DNA, 237 bp, unidentified
  source 1..237: mol_type = other DNA
  misc_feature 1..237: note = Synthetic
attcgtggtcacttgcgaatggccggacactccctagggcgctgtgacattaaggacctgccaaaagagatcactgtggctacatcacgaacgctttcttattacaaattaggagcgtcgcagcgtgtaggcactgattcaggttttgctgcatacaaccgctaccgtattggaaactataaattaaatacagaccacgccggtagcaacgacaatattgctttgctagtacagtaa

SEQ ID NO: 15735 - DNA, 33 bp, unidentified; identical to SEQ ID NO: 9021
  misc_feature 1..33: note = Synthetic
  source 1..33: mol_type = other DNA

SEQ ID NO: 15736 - DNA, 66 bp, unidentified
  misc_feature 1..66: note = Synthetic
  source 1..66: mol_type = other DNA
atgacttctgaatcaaaaagcatagaaaacgaatatcaaaaaaaactaacaaaacttttgctatag

SEQ ID NO: 15737 - DNA, 1641 bp, unidentified
  source 1..1641: mol_type = other DNA
  misc_feature 1..1641: note = Synthetic
atggctgatagcgaggctgtcgatccgactccttccggagacaccagctccgccgggaataccggagacaccagctccgccgggaataccggagacaccagctccgccgggaataccggagagactaccggcagtagcagcgccggcagtacagatgccacgaccgcgcacgcagcaggcacgacgccgacaccggtgcctgtgcccgaccccgccgtcggcgtgccgtcaagtattgtcgattttgcgaagttggtcaacaacacgtggaacacggccctgactagtacgatttgtttgcaccggcaacagcgcgacgccatcaggaatgttttgcgtgggtacatgtccaagaacaatacaaacaacaacgagagcggcgtctctgcgagcgtacctgccgccgcaaccagccaagatgtggctcccgcggacatactctcgtacccgtacatgctgggcaatagttactaccgtcagttgatgagctatgatcagatgcaagcgctcgtggaaatggttccgcgctcgaacaccgtcgatactgtcgggaagtacgttctgtacatggtcaattactacatgactgtggggcaagagcaagtctcgctacgcaccgcgagcgatccgaactacgggccctccgtgctgacaatcatgatgcataaaatcctcaaccgcgtgtacgagattcacacgcggacgcagtgcaagtacatgttcgtgggcatcccttcgtattactggcatggagtttctgtgtctgcgttgcaggtctggggcgcaggactattacgagaatcgtccatgaaactctacgctgcatatctgcgatttatcgcgcagaacccgcgcgacattcctagcgcgcggctcaaagtggagtacatgggcgagagctggaatttccgccgcagcgtacccgagttcgctatggaagctctgtgttttcgagcggacgacgagctcaccagatacgatctctctacagtgcgtgtttacgtggacaaggttgcaacagactcgtactcgtattacgagtaccctgtgctcgacagcagcgcgggagctgcgggggtgacgtcgaaaggaggagtgcccatcaagaatatgaactatggtagcgacattagcgcgctgttggtgatccccccgacttcagaagcagcgacaggcacgccagacccgtacctgtccctggcaaagctcatcactccggaggagtgcgggacccagctaaccgatgaagaccttactcccgcggcacgtgacgagagcaaagatacaaagctctccgaaggacaggacgagcctggcgccgtcgccgatcagacagaaaacacgatccccgtagggcttcaagacgaggatcccggagcagacattgctcgtcgtcgtggagatctaggttctctcgcaaactcggtgaggctgattcgggagctcgaggacagggtaaccacgctagctaaggaccacacagatgttgtgaactgctgcagtaccgtgtccgagggcctttctcgactggagcgccacgcggaaacactgcgcaagactatgctggcgctagtccgcaagattaacgtccagaccgggcgcgtgcctgcaggctacagagacgacatggtatacgagtaa

SEQ ID NO: 15738 - DNA, 27 bp, unidentified
  misc_feature 1..27: note = Synthetic
  source 1..27: mol_type = other DNA
atgagaggttttctacttgctcattag

SEQ ID NO: 15739 - DNA, 120 bp, unidentified
  source 1..120: mol_type = other DNA
  misc_feature 1..120: note = Synthetic
atgtggttatttcagcacctaaagcagtctttaagcccgctaaagaagaagcactcgcttgtatactaccaaagtattataaatctatggcagatatgtctattaagacaaatagtgtaa

SEQ ID NO: 15740 - DNA, 78 bp, unidentified; identical to SEQ ID NO: 9031
  source 1..78: mol_type = other DNA
  misc_feature 1..78: note = Synthetic

SEQ ID NO: 15741 - DNA, 225 bp, unidentified; identical to SEQ ID NO: 11283
  misc_feature 1..225: note = Synthetic
  source 1..225: mol_type = other DNA

SEQ ID NO: 15742 - DNA, 69 bp, unidentified; identical to SEQ ID NO: 2142
  source 1..69: mol_type = other DNA
  misc_feature 1..69: note = Synthetic

SEQ ID NO: 15743 - DNA, 30 bp, unidentified
  misc_feature 1..30: note = Synthetic
  source 1..30: mol_type = other DNA
aagaagttcttgcagatcatctgggaataa

SEQ ID NO: 15744 - DNA, 15 bp, unidentified
  misc_feature 1..15: note = Synthetic
  source 1..15: mol_type = other DNA
atggtttatatttaa

SEQ ID NO: 15745 - DNA, 24 bp, unidentified
  source 1..24: mol_type = other DNA
  misc_feature 1..24: note = Synthetic
atgttcactgggacttctacatag

SEQ ID NO: 15746 - DNA, 54 bp, unidentified
  source 1..54: mol_type = other DNA
  misc_feature 1..54: note = Synthetic
atgacgtttgcggcatcgtattcagtcgcaaacactacgatggtcattgtgtag

SEQ ID NO: 15747 - DNA, 15 bp, unidentified
  source 1..15: mol_type = other DNA
  misc_feature 1..15: note = Synthetic
atgccgccttcgtga

SEQ ID NO: 15748 - DNA, 69 bp, unidentified; identical to SEQ ID NO: 9041
  source 1..69: mol_type = other DNA
  misc_feature 1..69: note = Synthetic

SEQ ID NO: 15749 - DNA, 177 bp, unidentified
  source 1..177: mol_type = other DNA
  misc_feature 1..177: note = Synthetic
atacattcagacagtcacatttcatttcccatgtacgacgatctcatagaacagtgccatctatcgatggagcgtaaaagtaaactcgtcgacaaagcactcaataaattagagtctaccatcggtcaatctagactatcgtatttgcctccggaaattatgcgcaatatcatctaa

SEQ ID NO: 15750 - DNA, 177 bp, unidentified; identical to SEQ ID NO: 15749
  source 1..177: mol_type = other DNA
  misc_feature 1..177: note = Synthetic

SEQ ID NO: 15751 - DNA, 177 bp, unidentified; identical to SEQ ID NO: 9044
  misc_feature 1..177: note = Synthetic
  source 1..177: mol_type = other DNA

SEQ ID NO: 15752 - DNA, 2925 bp, unidentified
  misc_feature 1..2925: note = Synthetic
  source 1..2925: mol_type = other DNA
gtgcgcccgctttccaagatggctaccccttcgatgatgccgcagtggtcttacatgcacatctcgggccaggacgcctcggagtacctgagccccgggctggtgcagtttgcccgcgccaccgagacgtacttcagcctgaataacaagtttagaaaccccacggtggcacctacgcacgacgtaaccacagaccggtcccagcgtttgacgctgcggttcatccctgtggaccgcgaggataccgcgtactcgtacaaagcgcggttcaccctggctgtgggtgacaaccgtgtgcttgatatggcttccacgtactttgacatccgcggcgtgctggacagggggcctacttttaagccctactccggcactgcctacaacgctctagctcccaagggcgctcctaactcctgtgagtgggaacaaaccgaagatagcggccgggcagttgccgaggatgaagaagaggaagatgaagatgaagaagaggaagaagaagagcaaaacgctcgagatcaggctactaagaaaacacatgtctatgcccaggctcctttgtctggagaaacaattacaaaaagcgggctacaaataggatcagacaatgcagaaacacaagctaaacctgtatacgcagatccttcctatcaaccagaacctcaaattggcgaatctcagtggaacgaagctgatgctaatgcggcaggagggagagtgcttaaaaaaacaactcccatgaaaccatgctatggatcttatgccaggcctacaaatccttttggtggtcaatccgttctggttccggatgaaaaaggggtgcctcttccaaaggttgacttgcaattcttctcaaatactacctctttgaacgaccggcaaggcaatgctactaaaccaaaagtggttttgtacagtgaagatgtaaatatggaaaccccagacacacatctgtcttacaaacctggaaaaggtgatgaaaattctaaagctatgttgggtcaacaatctatgccaaacagacccaattacattgctttcagggacaattttattggcctaatgtattataacagcactggcaacatgggtgttcttgctggtcaggcatcgcagctaaatgccgtggtagatttgcaagacagaaacacagagctgtcctatcaactcttgcttgattccataggtgatagaaccagatatttttctatgtggaatcaggctgtagacagctatgatccagatgttagaatcattgaaaaccatggaactgaggatgaattgccaaattattgttttcctcttgggggtattggggtaactgacacctatcaagctattaaggctaatggcaatggctcaggcgataatggagatactacatggacaaaagatgaaacttttgcaacacgtaatgaaataggagtgggtaacaactttgccatggaaattaacctaaatgccaacctatggagaaatttcctttactccaatattgcgctgtacctgccagacaagctaaaatacaaccccaccaatgtggaaatatctgacaaccccaacacctacgactacatgaacaagcgagtggtggctcccgggcttgtagactgctacattaaccttggggcgcgctggtctctggactacatggacaacgttaatccctttaaccaccaccgcaatgcgggcctccgttatcgctccatgttgttgggaaacggccgctacgtgccctttcacattcaggtgccccaaaagttttttgccattaaaaacctcctcctcctgccaggctcatatacatatgaatggaacttcaggaaggatgttaacatggttctgcagagctctctgggaaacgatcttagagttgacggggctagcattaagtttgacagcatttgtctttacgccaccttcttccccatggcccacaacacggcctccacgctggaagccatgctcagaaatgacaccaacgaccagtcctttaatgactacctttccgccgccaacatgctataccccatacccgccaacgccaccaacgtgcccatctccatcccatcgcgcaactgggcagcatttcgcggttgggccttcacacgcttgaagacaaaggaaaccccttccctgggatcaggctacgacccttactacacctactctggctccataccataccttgacggaaccttctatcttaatcacacctttaagaaggtggccattacctttgactcttctgttagctggccgggcaacgaccgcctgcttactcccaatgagtttgagattaaacgctcagttgacggggagggctacaacgtagctcagtgcaacatgaccaaggactggttcctggtgcagatgttggccaactacaatattggctaccagggcttctacattccagaaagctacaaggaccgcatgtactcgttcttcagaaacttccagcccatgagccggcaagtggttgacgatactaaatacaaggagtatcagcaggttggaattcttcaccagcataacaactcaggattcgtaggctacctcgctcccaccatgcgcgagggacaggcttaccccgccaacgtgccctacccactaataggcaaaaccgcggttgacagtattacccagaaaaagtttctttgcgatcgcaccctttggcgcatcccattctccagtaactttatgtccatgggcgcactcacagacctgggccaaaaccttctctacgccaactccgcccacgcgctagacatgacttttgaggtggatcccatggacgagcccacccttctttatgttttgtttgaagtctttgacgtggtccgtgtgcaccagccgcaccgcggcgtcatcgagaccgtgtacctgcgcacgcccttctcggccggcaacgccacaacataa

SEQ ID NO: 15753 - DNA, 258 bp, unidentified
  misc_feature 1..258: note = Synthetic
  source 1..258: mol_type = other DNA
gtgagctcgccgagtacagacgtggtaacaatggatcccatagtgattgtaagtactatgacgaagaagcaagagaggaagttagttaagagattgtgtcaagagctgactcaattacatgaagatcttaaacgtgccagggaatcagataaaaatgatagtactacaagagagagcttgatgagacaacgtgctaaagttattgaggtcgaaaaggagctggaacgatatttcgacgacgatagactcgaggaatga

SEQ ID NO: 15754 - DNA, 57 bp, unidentified
  source 1..57: mol_type = other DNA
  misc_feature 1..57: note = Synthetic
atcttaaacgtgccagggaatcagataaaaatgatagtactacaagagagagcttga

SEQ ID NO: 15755 - DNA, 702 bp, unidentified
  source 1..702: mol_type = other DNA
  misc_feature 1..702: note = Synthetic
atgagcaaagacattcccacgccttacatgtggagctatcagccgcaaatgggcctggcagctggagcttctcaggattactccagtcgcatgaattggcttagtgccggcccccacatgattgggcgggtaaatggaattcgtgccactcgaaaccaaattctgctagaacaggccgccctaacctctaccccgcgacgtcagctgaacccaccctcttggcctgccgcccaggtttatcaggaaaaccccgccccgaccacagtccttctgccacgcgacgcggaagccgaagtccaaatgactaactccggagcgcaattagcgggcggcgccagacacgtcaggttcagagatcgaccctcgccctattcctccggctctataaaaaggctaatcattcgaggccgaggtatccagctcaacgacgaggtagtgagctcttccaccggtcctagacctgacggagtctttcagcttggaggcgccgggcggtcttccttcactcctcgccaggcgtacttaacgcttcagagctcttcatcccagcctcgctccggcggcatcggaaccctccagtttgtggaggagtttgtaccctccgtttacttcaaccccttctcgggcgctcctggtctttacccagacgacttcatcccgaactacgacgcggtgagcgaatctgtggacggctacgactga

SEQ ID NO: 15756 - DNA, 60 bp, unidentified; identical to SEQ ID NO: 9064
  source 1..60: mol_type = other DNA
  misc_feature 1..60: note = Synthetic

SEQ ID NO: 15757 - DNA, 60 bp, unidentified; identical to SEQ ID NO: 9064
  source 1..60: mol_type = other DNA
  misc_feature 1..60: note = Synthetic

SEQ ID NO: 15758 - DNA, 1710 bp, unidentified; identical to SEQ ID NO: 12718
  misc_feature 1..1710: note = Synthetic
  source 1..1710: mol_type = other DNA

SEQ ID NO: 15759 - DNA, 1710 bp, unidentified; identical to SEQ ID NO: 12718
  source 1..1710: mol_type = other DNA
  misc_feature 1..1710: note = Synthetic

SEQ ID NO: 15760 - DNA, 60 bp, unidentified; identical to SEQ ID NO: 7211
  misc_feature 1..60: note = Synthetic
  source 1..60: mol_type = other DNA

SEQ ID NO: 15761 - DNA, 60 bp, unidentified; identical to SEQ ID NO: 7211
  source 1..60: mol_type = other DNA
  misc_feature 1..60: note = Synthetic

SEQ ID NO: 15762 - DNA, 1710 bp, unidentified; identical to SEQ ID NO: 12676
  misc_feature 1..1710: note = Synthetic
  source 1..1710: mol_type = other DNA

SEQ ID NO: 15763 - DNA, 60 bp, unidentified; identical to SEQ ID NO: 7211
  source 1..60: mol_type = other DNA
  misc_feature 1..60: note = Synthetic

SEQ ID NO: 15764 - DNA, 1008 bp, unidentified
  misc_feature 1..1008: note = Synthetic
  source 1..1008: mol_type = other DNA
ttgctattccatagttacgccatagacatcgaaaatgaaatcaccgaattcttcaataaaatgagagatactctaccagctaaagactctaaatggttgaatccagtatgtatgtttggaggcacaatgaatgatatggccgctctaggagagccattcagtgcaaagtgtcctcctattgaagacagtcttttatcgcatagatataaagactatgtggttaaatgggaaaggctagaaaagaatagacggcgacaggtttctaataaacgtgtcaaacatggtgatttatggatagccaactatacatctaaattcagtaaccgtaggtatttatgtaccgtaaccacaaagaatggtgactgtgttcagggtgtagttagatctcatgtgtggaaaccttcttcatgcattccaaaaacatatgaactaggtacttatgataagtatggcatagacttatactgtggaattctttatgcgaaacattataataatataacttggtataaagataataaggaaattaatatcgacgattttaagtattcacaagcgggaaaggaattaattattcataatccagagttagaagatagtggaagatacgactgttacgttcattacgacgacgttagaatcaagaatgatatcgtagtatcaagatgtaaaatacttacggttataccgtcacaagaccacaggtttaaactaatactagatccgaaaatcaacgtaacgataggagaacctgccaatataacatgcagtgctgtgtcaacgtcattatttgtcgacgatgtactgattgaatgggaaaatccatccggatggattataggattagattttggtgtatactctattttaactagtagaggcggtatcaccgaggcgactttgtattttgaaaatgttactgaagaatatataggcaatacatatacatgtcgtggacacaactattattttgataaaactcttacaactacagtagtattggagtaa

SEQ ID NO: 15765 - DNA, 30 bp, unidentified; identical to SEQ ID NO: 9070
  source 1..30: mol_type = other DNA
  misc_feature 1..30: note = Synthetic

SEQ ID NO: 15766 - DNA, 72 bp, unidentified; identical to SEQ ID NO: 9073
  source 1..72: mol_type = other DNA
  misc_feature 1..72: note = Synthetic

SEQ ID NO: 15767 - DNA, 372 bp, unidentified
  misc_feature 1..372: note = Synthetic
  source 1..372: mol_type = other DNA
agggcgatgacgacatcggcgatgacggctcctgatacgcgccgacagctgcagcacgtggagacgctgcgtcggtttctacgcggcgacagctgctttgtgcacgatctccggggcatgatggactatcacgacgggctctcgcgccgtcaacagcgtgccttttgccgcgcgggtcgcgtgttgacggacccggagcccatccagagcgagacggagggggagaataaacagtttacggagcacacacacaaagtagtctcgttttttattaaaagtgtctttgtatttccctgtcttgtgttgcccaactgctgtcaggtctccgtagatcgctcccgggtgcccgagacggggggcagatggctataa

SEQ ID NO: 15768 - DNA, 27 bp, unidentified
  source 1..27: mol_type = other DNA
  misc_feature 1..27: note = Synthetic
atgaacactgcttctcccattcaataa

SEQ ID NO: 15769 - DNA, 1161 bp, unidentified
  misc_feature 1..1161: note = Synthetic
  source 1..1161: mol_type = other DNA
ttgccttgctcctgccacactaccctgaccatggaacgcgaccttgagaggggcccaccgggcccgccacggccccctctaggaccccccctctcctcttccataggccttgctctccttctcctgctcttggcgctactgttctggctgtatatcgttatgagtaactggactggaggagcgctccttgtcctctattcctttgctctcatgcttattattatcattctcatcatctttatcttcagaagagaccttctctgtccacttggaggccttggtctactcctactgatgatcaccctcctactcatcgctctctggaatttgcacggacaggcattgtaccttggaattgtgctgttcatctttggctgcttacttgtcttaggtctctggatctacttcttggagattctctggcggcttggtgccaccatctggcagcttttggccttcatcctagccttcttcctagccatcatcctgcttattattgctctctatctacaacaaaactggtggactctattggttgatctcctttggctcctcctgtttatggccattttaatctggatgtattatcatggaccacgacacactgatgaacaccaccacgatgactccctcccgcaccctcaacaagctaccgacgattctagccatgaatctgactctaactccaacgagggcagacaccacctgctcgtgagtggggccggcgacggacccccactctgctctcaaaacctaggcgcacctggaggtggtcctgacaatggcccacaggaccctgacaacactgatgacaatggcccacaggaccctgacaacactgatgacaatggcccacatgacccgctgcctcaggaccctgacaacactgatgacaatggcccacaggaccctgacaacactgatgacaatggcccacatgacccgctgcctcataaccctagcgactctgctggaaatgatggaggccctccaaatttgacggaagaggttgaaaacaaaggaggtgaccgggacccgccttcgatgacagacggtggcggcggtgatccacaccttcctacgctgcttttgggtacttctggttccggtggagatgatgacgacccccacggcccagttcagctaagctactatgactaa

SEQ ID NO: 15770 - DNA, 54 bp, unidentified; identical to SEQ ID NO: 9063
  misc_feature 1..54: note = Synthetic
  source 1..54: mol_type = other DNA

SEQ ID NO: 15771 - DNA, 33 bp, unidentified; identical to SEQ ID NO: 9080
  source 1..33: mol_type = other DNA
  misc_feature 1..33: note = Synthetic

SEQ ID NO: 15772 - DNA, 264 bp, unidentified
  source 1..264: mol_type = other DNA
  misc_feature 1..264: note = Synthetic
ctggcgagagcgcgcttcttttccgcggtcttttttccgttttgtaaagaatccggatgcgtgtttttaaggacgaggaaatctacgcgtactgcggcgcgcaccccgaagagccgcgctgtcgctgcctgtaccccgagcccagcgtggaggccatcgggcgcgacctgcggctgccgtactactgctggtacgagccgtgcaagcgcgcggacgcactgctgcccgccgcgctacgcgccaatatcgcgcgctgcaacgtga

SEQ ID NO: 15773 - DNA, 405 bp, unidentified
  source 1..405: mol_type = other DNA
  misc_feature 1..405: note = Synthetic
atgcgtgtttttaaggacgaggaaatctacgcgtactgcggcgcgcaccccgaagagccgcgctgtcgctgcctgtaccccgagcccagcgtggaggccatcgggcgcgacctgcggctgccgtactactgctggtacgagccgtgcaagcgcgcggacgcactgctgcccgccgcgctacgcgccaatatcgcgcgctgcaacgtgaccaactgcagcgtgacgctcggcgagatcgtgctacgcaacggcgcgctcgaagtcagcaacgcctgcctgtcgagcagcgcgctgcccgtgagctttgcggcgcgctacctgaaccagcaggagcttccgcccgtgctgccgccaggcgtgctcctgctgtgcttttgcgcggcggcactgctcgtggcgctatga

SEQ ID NO: 15774 - DNA, 27 bp, unidentified
  misc_feature 1..27: note = Synthetic
  source 1..27: mol_type = other DNA
atgagaggttttctacttgctcattag

SEQ ID NO: 15775 - DNA, 120 bp, unidentified
  source 1..120: mol_type = other DNA
  misc_feature 1..120: note = Synthetic
atgtggttatttcagcacctaaagcagtctttaagcccgctaaagaagaagcactcgcttgtatactaccaaagtattataaatctatggcagatgtgtctattaagacaaatagtgtaa

SEQ ID NO: 15776 - DNA, 120 bp, unidentified; identical to SEQ ID NO: 15739
  source 1..120: mol_type = other DNA
  misc_feature 1..120: note = Synthetic

SEQ ID NO: 15777 - DNA, 42 bp, unidentified; identical to SEQ ID NO: 9087
  source 1..42: mol_type = other DNA
  misc_feature 1..42: note = Synthetic

SEQ ID NO: 15778 - DNA, 45 bp, unidentified
  misc_feature 1..45: note = Synthetic
  source 1..45: mol_type = other DNA
attataaatctatggcagatgtgtctattaagacaaatagtgtaa

SEQ ID NO: 15779 - DNA, 432 bp, unidentified
  misc_feature 1..432: note = Synthetic
  source 1..432: mol_type = other DNA
atgcatactaaactcgcatcaataactcaattagttattgccaagatagaaactatagataatgatatattaaacaacgacattgtaaatttcattatgtgtagatcaaacttaaataatccatttatctctttcctagatactgtatatactattatagatcaagagatctatcagaacgagttgattaattcattagacgacaataaaattatcgattgtatagttaataagtttatgagcttttataaggataacctagaaaatatagtagatgctatcattactctaaaatatataatgaataatccagattttaaaactacgtatgcagaagtactcggttccagaatagcggatatagatattaaacaagtaatacgtgagaatatactacaattgtctaatgatatccgcgaacgatatttgtga

SEQ ID NO: 15780 - DNA, 498 bp, unidentified
  misc_feature 1..498: note = Synthetic
  source 1..498: mol_type = other DNA
gtgttagaaatggatgaagcatattactctggtaacttggaatcggtactcggatacgtgtccgatatgcataccgaactcgcgtcaaaatctcaactaatcattgcaaagatagaaactatagataatgatatattaaacaacgacattgtaaattttatcatgtgtagatcaaacttggataatccatttatctctttcctagatactgtatatactattatagatcaagagaactatcagactgagttgattaattcattagacgacaatgaaattatcgattgtatagttaacaagtttatgagcttttataaggataacctagaaaatatagtagatgctatcattactctaaaatatataatgaataatccagattttaagactacgtatgccgaagtactcggttccagaatagccgatatagatattaaacaagtgatacgcaagaatatactacaattgtctgatgatatccgcgaacgatatttgtga

SEQ ID NO: 15781 - DNA, 831 bp, unidentified
  source 1..831: mol_type = other DNA
  misc_feature 1..831: note = Synthetic
atgctgctgtttttactttgccttcttttctgctctgcctatgccgccgtgccagaaaaaacccttaacaacctcgttcgggtgtacgccttagttggtaccaatctatcccttgattctatgaaaactcctcagattgacgaacttactagtcttagctggatcaaacaggaagacaatcctaacaaaaacttacaatcatttttttttattggtcaaaaactctgtgaagttaccaaagacaaaatcactgtttttaactattatccgttggaattttcctgcgctaacgtaaccttgtatttgtataatcttaaaactgacgattctggcctctataatggaaaggcccataccaaagagcttgaacataacacctatgttaggctttatgttattgacattcctccgcctaagtgtgacattacttcacgttacttaggcatacaggctactggggaagattattgtttaattgaaattaattgcactaactccaaatacccagctgtggttaaatttaatggcaggcaaagcaacttctaccattatgttagcgaaaacggaaacaaaaaacttccaaatttttatgaaacacacatcactgttaatggtacccacaaaagctttcactttaattacccttttaacgacctttgtcaaacaaccagcgctctacaatataatgacaatgtccaggtagtcctcattcttctcatagtagttggcttaataataatttccgctagtttaatattgctttattgccaccgcaaaaaaatcaaggccaaagttcaacatcaaccagtgcatatttgtttagaaaaataa

SEQ ID NO: 15782 - DNA, 114 bp, unidentified; identical to SEQ ID NO: 9097
  misc_feature 1..114: note = Synthetic
  source 1..114: mol_type = other DNA

SEQ ID NO: 15783 - DNA, 303 bp, unidentified; identical to SEQ ID NO: 15649
  misc_feature 1..303: note = Synthetic
  source 1..303: mol_type = other DNA

SEQ ID NO: 15784 - DNA, 51 bp, unidentified; identical to SEQ ID NO: 9099
  source 1..51: mol_type = other DNA
  misc_feature 1..51: note = Synthetic

SEQ ID NO: 15785 - DNA, 231 bp, unidentified; identical to SEQ ID NO: 12054
  misc_feature 1..231: note = Synthetic
  source 1..231: mol_type = other DNA

SEQ ID NO: 15786 - DNA, 879 bp, unidentified; identical to SEQ ID NO: 14868
  misc_feature 1..879: note = Synthetic
  source 1..879: mol_type = other DNA

SEQ ID NO: 15787 - DNA, 60 bp, unidentified; identical to SEQ ID NO: 9112
  source 1..60: mol_type = other DNA
  misc_feature 1..60: note = Synthetic

SEQ ID NO: 15788 - DNA, 2052 bp, unidentified
  misc_feature 1..2052: note = Synthetic
  source 1..2052: mol_type = other DNA
atggagaatcatctgccggacatgctgatgtttcccaactgcgtttctgtgtttccctttgagtactcgctggaggacgtgttccgcctccccgaggagcgacggcgcgcgttcgccatggccgtgttcccgctctccaagcaccgctggaggggcgcgcggctccagcgcgacgagcgaagcgtgtggctcagcgtcgaggaggaccgcgggcgcgcgctgggcgagcggaactgctcttggctctcggacgtagccgcgcgcatggtcgacgacgagggccgcgcggtcacgcccgaggcgtacgccttcatgcgcgccgcgcccggcgcgcgcgtcgccgagctcgccgcagacgcgggcgtgctagcgggcctcgtcgccggcggcaacgcgctgcgcgtcttctcctcggagtccacgcaggcgcgcgagggctggaaggcgcgcagcgtgggcgtgctcggcaacgcggcgccgctggcgcccgtgccgctggcgtctctgcgtccggaagtgcagcgcgagctcttcgccgcctggatcggccgccgccccgtggtgctcacgggcggcacgggcgtggggaagacctcgcaggttcccaagctgctgatgtggttcaactacctcttcggcggcttcgagcgcctggacgccgttcgcgagttcgcggagcgcccgctcgtgctctcgctgccgcgcgtcacgctggtgcgcgcgcacaccgctacttacctcgcctcgctgggcttcggctcggccgacggctccccggtctcgccgcggtacggcgccatcccagacgccgagcggaacacagccccgcgcacctacgggctcgtggtggccactcaccggctcacgctgaccgccatccgccgctacgacacggtcgtagtagacgagatccacgagcacgaccagatgggcgacatcgtggtcgcggtcgcgcggaaactgggctcgaacatgcgatcgctggtgcttatgacggccacgctcgaggacgaccgcgcgcgcctggaggagttcctggaccggcccgcctttgtgcacatagagggcgacacgctcttccccatccgcgaggtctacgtgaagaacacgcaacagccgccgctctcgcgcaagtacgcggaggcggagctgcagaacgtagtgcaggcgctcggcaccttcgtccccgagcagggaaagtgcggcatcctcttcgtagccacggtggcgcagtgcgcgctcttcgcggagaccatcgaggccagacaccccgggctgctggtgcgcgtggtgcacgggaaggtgccctccgtggccgcggtgctcgaggaggtctacgccgcggaccggcccgcggtgctggtttccacgccgtacctagagtccagcgtgaccgtgcgcaccgccacgcacgtctacgacactgggcgcgtgtacgtgcccgagcccttcggcggccgcgagaccttcgtctccaagtccatgtacacgcagcgcaagggccgcgtgggccgcgtggcgcccggcacctacgtgcgcttcttcgacacgcggctcgcgctgccgctgaagcgcatcgactccgagttcctgcacccgtacgtgctgtacgcgcgcatcttcgggctaacgctgcccgacgacctgctcgtgcagcccagcgacctcgcgctgctgcgccgcaccgaggagtacgtcgacggcttcggcatcagcctctcgcgctggacgcagctgctggaccggcactacatgcacatggtcgagtacgcgaaggtgtacgtgcgcggcgggcgcctcgccgccgcgctggacgccttcgagcgcaccggcgtgatgacgcacgaggccaccgaggccatccgcgccgtggacatgctcgcagtcgtcctaaacgtgcgcaagtccaaggaccgctaccgcgcggagtgcaaggtgctcttcgggcccttcgcgggcaaaaagttcgtggtcgccgggcggcgtccgcccggctcgcacgtgctcatggtcacagaccgcgtcttcatcgaggccgagcccccattctga

SEQ ID NO: 15789 - DNA, 6630 bp, unidentified; identical to SEQ ID NO: 12701
  misc_feature 1..6630: note = Synthetic
  source 1..6630: mol_type = other DNA

SEQ ID NO: 15790 - DNA, 90 bp, unidentified; identical to SEQ ID NO: 9119
  misc_feature 1..90: note = Synthetic
  source 1..90: mol_type = other DNA

SEQ ID NO: 15791 - DNA, 174 bp, unidentified
  source 1..174: mol_type = other DNA
  misc_feature 1..174: note = Synthetic
atgcaccggcccagccagtcggacaccggaacccaccagaggcggaagccgccttcgcccgtgagggtgcgtgtgttttctggtggcgtgtttttcctttccgccctcctccctccccacctccaccacccccccccacaactcgcccgttggcgatcggcgggaaaaccatga

SEQ ID NO: 15792 - DNA, 663 bp, unidentified
  misc_feature 1..663: note = Synthetic
  source 1..663: mol_type = other DNA
gtgtgttttctggtggcgtgtttttcctttccgccctcctccctccccacctccaccacccccccccacaactcgcccgttggcgatcggcgggaaaaccatgaaaaccaagccactcccgacagccccgatggcgtgggccgagagtgccgtggaaaccaccaccagcccgcgcgagctcgcgggccacgccccgctccggcgcgtcctgcgcccgcccatcgctcgccgcgacggcccggtgcttttgggggacagggcccccaggaggacggccagtacgatgtggctgctggggatcgaccccgcggagtcgtctccgggaacgcgcgctacccgagacgataccgagcaggccgtggacaagatcctcaggggagcccggcgcgcgggagggctgaccgtccccggcgccccccgctatcacctgacccgccaggtaaccctgacggatctctgccaaccaaacgcggagcgggccggggcgctccttttggccctgcggcaccccaccgacctcccccacctggcccgccatcgggctccgcccggccggcagaccgagcgactggccgaggcctggggccagctcctggaggcctccgccctggggtccgggcgggccgagagcggctgcgcgcgcgcgggccttgtgtcgtttaa

SEQ ID NO: 15793 - DNA, 39 bp, unidentified; identical to SEQ ID NO: 9122
  misc_feature 1..39: note = Synthetic
  source 1..39: mol_type = other DNA

SEQ ID NO: 15794 - DNA, 9060 bp, unidentified
  source 1..9060: mol_type = other DNA
  misc_feature 1..9060: note = Synthetic
atgagcacacttcctaaacctcaaagaaaaaccaaaagaaacaccaaccgtcgcccaatggacgtcaagttcccgggcggcggccagatcgttggtggagtttacttgctgccgcgcaggggcccacgattgggtgtgcgcgccacaagaaagacatccgagcgatcccagcccagaggtaggcgccaacctatacccaaggcgcgcccatctcagggccggacctggggtcagcctggctacccctggcccctgtatgggaatgagggctgcgggtgggcaggctggcttatgtctccccgcggctctcgcccttcttggggcccaaacgacccccggcgtcggtcccgtaatttgggtaaggtcatcgataccctgacatgcggactcgccgacctcatggggtacattcccgtcgtaggcggacccttgggtggcgtcgcggctgcgctcgcacatggtgtgagggcaatcgaggacgggattaactatgcaacagggaatcttcctggttgctctttttctatcttcatcctggcactgctctcgtgcctcaccacaccagcctcggcgctcacatacggcaactccagcgggttgtaccatctaaccaatgattgtccacgctccagcatagtgctggaagcggaggccatgatcctacacctagctggttgtgtgccttgcgtgagagccggaaacatttcacgctgctggcatcctgtttcacccaccctggctgtaccgaatgcctcggtgcctgcgagcgggttccgcaaacatgtggatctcctcgcaggcgctgcagtcgtttgctcttcgatgtatatcggagacctctgcggtgccgtatttttggcaggacagttggctaccttcagtcctcgcatccacgacataacgcaggactgcaattgttcggtttatacaggccatgttaccggccacagaatggcgtgggacatgatgatgaactggtcgcctaccactaccctggtcctgtcgagcattctgagagtgcccgaaatagtgctcgaggtgttcgccggcggtcactggggtgtcctgatcgccatcgcctacttcggcatgtcaggcaattggttgaaggtaatcgctgtgttattcctgtttgcaggggtagaggcaaccaccaccgtcggcagagcggccggccgttctgcttatctcttcacctccattttctcgtctggtccaaatcagaagatacagcttattaacaccaatggtagctggcacataaataggaccgctctaaactgtatcgacagtctccaaactgggtttcttagcgcgttgttctaccgcagcaatttcaactccacgggttgctcagaacggcttggcgcatgcaagcccttggaacacttccagcagggatggggccctataacccacaagtccaacatcacagggccgtctgaggaccggccctactgctggcactatgctcctagggagtgtagtgtagtgccggcgtcatcagtgtgtggtcctgtttactgcttcacacctagccctgtcgtggtgggcaccaccgacaggctgggcaaccctacttacaactggggagaaaacgagacggatgtgttcatgctagagagcctgcggcctccgcaaggaggttggttcgggtgcacgtggatgaactctacgggcttcaccaagacctgcggagccccgccttgccagttaatcccaggagactataatagttcttctaaccagctcctgtgccctactgactgcttccggaaacatccggaggccacatatcagaagtgtgggtcggggccctggctgacccccaggtgtctggtggactatccctacagattgtggcactatccatgcactgtcaactacacaatacacaaggttcgcatgttcattgggggcgttgagcacaggttcgatgccgcctgtaattggacgcgtggcgaccgttgcgacttgtatgacagagataggattgagatgagtcccctcctcttttcaaccacgcagcttgctatcttgccttgcagctttaccaccatgcccgccttgtcaacaggacttatacatctccatcaaaacattgtagatgtgcaatacctctacggagtctcctcgagcatagtatcgtgggccgtgaagtgggagtatgtcgtcctcatgtttttggtcctggcggatgctcgaatatgcacttgcctttggttgatgctgctcgtcggcaaggtcgaagcagcattggagcggctcgtcgtcctcaatgcagccagcgccgcgggtaccgccggttggtgttggaccctcatcttcctgtgctgcgtgtggcacgtgaaggggcgccttgtgcccgcatgcacctacacagctctaggcatgtggccgattctcctggtgattctggccctgccccaacgggcatatgcctgggacaatagtcaggctgcatcacttggggtcgttgcccttctggtgttgacaatctttaccctcagccctatgtacaaacagctgctcacacacgctatctggtggaaccaatacatgttggctcgggctgaagctatgatacatgattgggtgccagatttgcgggtcaggggcggtagggatgccatcattctgctcacctgcttgttacacccacatctcgggtttgaggtcacaaagattttgttagccatcttagcccctctgtatatcctccagcacagtctgctcaaggtgccctactttgtgcgcgcccacatcctcctgcgggcttgtatgttcttccgcaaagtggcggccggtaaatatgtgcaagcttgcctcttgaggttgggcgcctggactggcacatacatatacgatcatctagctcctctcagtgagtgggcgagcgacggcttgcgtgatctagccgtagctgttgagccagtcatcttttcccccatggagaaaaagatcattacgtggggtgcagacaccgctgcgtgtggcgacatcttgaggggtctccctgtgtccgcgagactaggggacttggtgctgctgggacccgcggatgacatgcgtcacggaggttggaagcttctggctcccatcaccgcatacgcccaacagacgcggggactggttggcactatagtgactagtttgaccggccgcgacaagaatgaagctgagggggaagtgcaggttgtatcaacagccactcagagtttcctggcgaccactatcaacggtgtcctatggactgtttatcacggtgctggctcgaaaaaccttgccggaccaaaagggcccgtatgccagatgtatacaaatgttgaccaagacctggtgggctggccagcccccctgggggctaggtcacttgccccctgcacctgtgggtctagcgacctctacctggtcacgagaggtgctgatgttatccctgcacgtcgtaggggtgatactcgcgctgctcttttgtcccccagacccataagcaccctcaaaggctcttcaggaggcccccttatgtgcccatcagggcacgtagtagggctcttcagggcggccgtgtgtacgaggggcgtggccaaggccctggacttcatccctgtggagaatatggacacaaccatgcgatctcctgtgtttaccgacaactcctcgccgcctgcggtgcctcagacctaccaggtggggtacctgcacgctccgacgggtagcggtaaaagtactcgtgtcccggcagcttacgccacccagggatacaaggtgctagttctgaatccgtctgtagcggcaacgctgagcttcggggcatacatgagcaaagctcatggtatagacccgaatatccggacgggtgtcaggaccatcaccacagggggtcccgtaacatactcaacatatgggaagtttctggccgatgggggatgttcaggaggagcatatgatatcatcatctgtgacgagtgccactccacagacccaacgacggtgcttggcatcggcactgtcctagaccaggcagaaaccgcgggggtccgcctcacggtgctcgctacggcgacgccgccaggctctgtcactgtcccccatcctaatataacagagacagctctcccgactacgggggagataccattttatggcaagtgtatccccctcgaatttatcaaggggggaagacatctcatcttctgtcactcaaagaagaaatgcgacgaactgtctaaacaactaacctcattaggtctcaatgctgtcgcattctatagaggtgtcgatgtggctgtgatccccacctcaggcgacgtcgtcgtctgcgcgacggacgcccttatgaccggctacacgggcgactttgactctgtcattgattgtaacgtagccgtgacgcaggtggtagacttcagcttggacccaactttttccatagagaccaccacagtcccccaagacgctgtctcgagaagccaacggcgtggtcgcacgggacgaggaaagccgggggtgtataggtttgtctcgcagggggaaagaccttcaggtatgtttgatagcgtcgtgctctgtgaagcttatgacacggggtgcgcatggtatgagctaactcctgcagagacaacggttagactacgtgcctacctaaacactcccgggttgcccgtctgccaagaccacctggagttttgggagggggtattcacaggattgactcacatagatgcccacttcttgtcccagacgaagcaggggggcgagaactttgcctacctcgtggcctatcaggccacggtgtgtgccagagccaaagcccccccgccgtcatgggacgtgatgtggaaatgtctcaccagacttaagccgaccctcacaggtcctacccccctcctatatcgtctgggggctgtccaaaatgagatagtaacaacacatccaatcacaaagtacatcatgacctgcatgtctgcagacctggaagtcatcacaagtacgtgggtaatcgtaggtggagtccttgccgcattagcagcctactgtttgacagtgggctgtgttgtcatctgtggcaggatcgtgacaagcggcaagcctgcggttgtccctgatcgggaggtcctgtaccagcagtttgatgagatggaggagtgctctaagcacatcccctacctagttgagggtcagcagattgctgagcagttcaagcaaaaggtccttgggctgctccaggccggcaccaaacatgcagaagaactgaaacccgctatccattccacgtggcccagggtggaggagttctggaggaaacacatgtggaactttgttagtgggattcagtacctggcgggcttatcaacactaccaggtagtccggcggtggcgtcgctaatgtcattcacagcgtccttgactagtcctctaaggacctcccagaccctgttgctcaacatattgggcggctggatagcttcccaagtagctcccccctccgcgtccacagctttcgtcgtgagcggcttagcaggcgccacggtggccagcataggactggggagggttattgttgacatccttgccgggtacggggccggtgtggcgggtgcactggtcgcctttaagatcatgagcggcgagtgtccatcaacagaggacatggtgaacttgctacccgccttgctgtcgccgggtgcccttgtggtgggagttgtgtgtgctgccatcctgagacgccacgttggcccctctgaaggcgctaaccagtggatgaacaggctaatagcctttgcctccaggggcaaccatgtctctcctacacactatgtgcccgagacggacgcatcaaacaaagtcacccaaatactcagttcacttaccatcactagcctgttacgcaggctacaccagtggattcacgaggatacgtccacgccttgcgcgtcctcatggctgcgagacgtgtgggactgggtgtgtacagtgctatctgacttcaagacctggctcaaggccaaaataacgccccgcatacctggaatcccctttatatcttgccaggcagggtataggggagtttgggctggtgacggggtgtgtcacaccacttgctcatgcggggctcaaattgctggacacgtgaagaacgggtctatgaagatcacaggaccccggatgtgcagcaacacttggcatggaacgtttccgatcaacgccacaactaccagccctagtgtgccggtaccggcccccaactacaaacgcgctctctggcgagtttccgctgaggagtacgttgaagtagagaggcacggcgaccgtcactatgtggtgggagtcactgctgatggccttaaatgcccttgccaagttcccggacctgagttcttcactgaggtggatggcgtaaggatacatcgttatgcgccaccctgcaaacccctgcttagagatgaggtgagcttctctgtgggcctcctagagtttgttgtggggtctcagctcccttgtgagccagagcctgacgtgaccgtagtcacgtcaatgctcactgacccctcacacatcaccgcagagacagcctctcggcgcttgaagaggggatctcccccctccctggcgagttcatccgccagccagttgtcagcgccatcacttaaagccacttgcacggcgaacggagaccacccggacgccgagctgatcgaggccaatctcctatggagacaggagatgggaagcaacatcacccgggttgagtcggagaccaaagttgtcatcctcgactcgtttgatcctctggttgcagagtatgacgacagggagatatcagtgtcagcagagtgccatagaccacctaggcctaagttccctcctgctctcccgatttgggccagacctgactacaatccacctctcctacagaaatggcaaatgcccggatacgagccccccgtcgtgtctggatgtgcgttgcctccagctaaaccaacacctatcccgccaccaaggcggaagaggctcatacagctggacgagtctgctgtatcgcaagctctacaacagctggctgataaggtgtttgtggaggacactagcacctcagagccgagctccggcctcggagggtcaatagccggcccatcatctcctgacccgacaacagcagatgacacgtgttctgacgcgggatcctttagctcaatgccccccctcgagggggaacctggagacccagacttgagcactggttcctggtccactgttagtgaagaggacgatgtcgtctgttgctctatgtcatacacttggacgggggccttgatcacaccatgcgctgctgaggaggagaaattgccaataaaccctttgagcaattctctcataagacaccacaacatggtctactccacgacatcacgtagcgccggccttcgccagaagaaagtcacatttgacagactacaggtagttgaccaacactaccaagatgtcctaaaggagattaagctcagagcatcgaccgtgcacgccaggctcctatccaccgaggaggcctgttcgctcactccaccgcactcagcccgatcaaggtatgggtatggagcacgggatgttaggagccatactagcaaggccgttaaacacatcgactccgtgtgggaggacttgctagaagacaatgccaccccaatacctaccactatcatggccaagaatgaagtcttctgtgtagacccgtcaaaagggggtcgcaagcccgcgcggttaattgtttatccagacttatccgtgcgggtttgcgagaagatggcactctacgatgtgacgcagaagttgcctaagaccgtgatgggatctgcatacggtttccagtactccccctcccaacgggtagagtacttgctcaaaatgtggcgctcgaagaaaacgccaatggggttttcatatgacaccaggtgcttcgattcgaccgtcaccgagcgggatatccgaactgaagaggacatctaccaatcttgccaactagaccctaccgcgaggaaagcaatatcatccctcacagaacgcctctattgtggtggcccgatgtttaactccaaaggggaatcatgtggctatcgcagatgccgtgccagtggggtgctcactaccagtttggggaacaccctcacttgttatcttaaggcacaggcggcgtgtagggcagccaacatcaaaaattttgacatgctggtatgcggagatgatctggtggtcatttgtgagagcgccggcgtacaggaggatgtcgtagcactgagagcgtttacagacgctatgatcagatactcagctcccccaggagatgcgccacagcccacatacgaccttgagctgataacatcatgctcgtccaacgtctccgtagcccacgatggcaccggacagagatattactacctcacccgtgactgtaccactccacttgcgcgagctgcttgggagacagctcgccatacccctgtcaattcgtggttgggcaacatcatcatgtacgcccccacaatatgggtacgcatggtcctcatgacccatttcttctccatcctccaatgccaggagcagttggaggcggcacttaattttgacatgtatggggtaacctactccgtcactccactcgatctccctgcaatcattcaacgactccatggtatggcagctttttccctacatgggtactctccaactgaactcaacagggtgggagcgagcctcaggaagcttggggcgccacccttaagagcttggagacatcgagccagagctgtcagagccaaactcattgcccaaggtgggaaagcagcgatatgcggcaagtacctctttaactgggcagtgaagaccaagctcaaactcactccattggctgcggcaagccagcttgatttgtcaggctggtttgtcgcaggctacgacgggggggacatttatcacagcgtgtcccgggctcgaccccgtctgttactccttggcctactcctactcactgtaggggtaggcatctttttactccccgctcggtag

SEQ ID NO: 15795 - DNA, 39 bp, unidentified; identical to SEQ ID NO: 9122
  misc_feature 1..39: note = Synthetic
  source 1..39: mol_type = other DNA

SEQ ID NO: 15796 - DNA, 27 bp, unidentified
  source 1..27: mol_type = other DNA
  misc_feature 1..27: note = Synthetic
atgatgatgttcaatgtctgttggtga

SEQ ID NO: 15797 - DNA, 39 bp, unidentified; identical to SEQ ID NO: 9122
  source 1..39: mol_type = other DNA
  misc_feature 1..39: note = Synthetic

SEQ ID NO: 15798 - DNA, 555 bp, unidentified
  misc_feature 1..555: note = Synthetic
  source 1..555: mol_type = other DNA
aagaaaaccaaaagaaacaccaaccgtcgcccaatggacgtcaagttcccgggcggcggccagatcgttggtggagtttacttgctgccgcgcaggggcccacgattgggtgtgcgcgccacaagaaagacatccgagcgatcccagcccagaggtaggcgccaacctatacccaaggcgcgcccatctcagggccggacctggggtcagcctggctacccctggcccctgtatgggaatgagggctgcgggtgggcaggctggcttatgtctccccgcggctctcgcccttcttggggcccaaacgacccccggcgtcggtcccgtaatttgggtaaggtcatcgataccctgacatgcggactcgccgacctcatggggtacattcccgtcgtaggcggacccttgggtggcgtcgcggctgcgctcgcacatggtgtgagggcaatcgaggacgggattaactatgcaacagggaatcttcctggttgctctttttctatcttcatcctggcactgctctcgtgcctcaccacaccagcctcggcgctcaca

SEQ ID NO: 15799 - DNA, 39 bp, unidentified; identical to SEQ ID NO: 9122
  misc_feature 1..39: note = Synthetic
  source 1..39: mol_type = other DNA

SEQ ID NO: 15800 - DNA, 84 bp, unidentified; identical to SEQ ID NO: 9134
  misc_feature 1..84: note = Synthetic
  source 1..84: mol_type = other DNA

SEQ ID NO: 15801 - DNA, 24 bp, unidentified
  misc_feature 1..24: note = Synthetic
  source 1..24: mol_type = other DNA
atggtgtccatcgtggacgaatag

SEQ ID NO: 15802 - DNA, 45 bp, unidentified; identical to SEQ ID NO: 9136
  misc_feature 1..45: note = Synthetic
  source 1..45: mol_type = other DNA

SEQ ID NO: 15803 - DNA, 1038 bp, unidentified
  misc_feature 1..1038: note = Synthetic
  source 1..1038: mol_type = other DNA
atggatatcttcagggaaatcgcatcttctatgaaaggagagaatgtattcatttctccagcgtcaatctcgtcagtattgacaatactgtattatggagctaatggatccactgctgaacagctatcaaaatatgtagaaaaggaggagaacatggataaggttagcgctcaaaatatctcattcaaatccataaataaagtatatgggcgatattctgccgtgtttaaagattcctttttgagaaaaattggcgataagtttcaaactgttgacttcactgattgtcgcactatagatgcaatcaacaagtgtgtagatatctttactgaggggaaaatcaatccactattggatgaaccattgtctcctgatacctgtctcctagcaattagtgccgtatactttaaagcaaaatggttgacgccattcgaaaaggaatttaccagtgattatcccttttacgtatctccgacggaaatggtagatgtaagtatgatgtctatgtacggcaaggcatttaatcacgcatctgtaaaggaatcattcggcaacttttcaatcatagaactgccatatgttggagatactagtatgatggtcattcttccagacaagattgatggattagaatccatagaacaaaatctaacagatacaaattttaagaaatggtgtaactctctggaagctacgtttatcgatgttcacattcccaagtttaaggtaacaggctcgtataatctggtggatactctagtaaagtcaggactgacagaggtgttcggttcaactggagattatagcaatatgtgtaattcagatgtgagtgtcgacgctatgatccacaaaacgtatatagatgtcaatgaagagtatacagaagcagctgcagcaacttgtgcactggtgtcagactgtgcatcaacaattacaaatgagttctgtgtagatcatccgttcatctatgtgattaggcatgttgatggaaaaattcttttcgttggtagatattgctctccgacaactaattgttaa

SEQ ID NO: 15804 - DNA, 45 bp, unidentified; identical to SEQ ID NO: 7518
  source 1..45: mol_type = other DNA
  misc_feature 1..45: note = Synthetic

SEQ ID NO: 15805 - DNA, 66 bp, unidentified; identical to SEQ ID NO: 9139
  misc_feature 1..66: note = Synthetic
  source 1..66: mol_type = other DNA

SEQ ID NO: 15806 - DNA, 975 bp, unidentified
  misc_feature 1..975: note = Synthetic
  source 1..975: mol_type = other DNA
atggttatctcaaacgagaaagaaaaatttccaatctcagggacaaaggactggataaattcatacttgataaacccaatgatatcaccagtggttgtgtatgaatggaaagatgacattgctgatctgggaatgataacaccatttaatgagtgttcagtagtaccaggcgaaaaactattgattcataaagtgtgcgcaataaaacatgaacattggtgtggacatctgcatgtcccagatcaggagagaagtttttggaaacatgaatccagactatgcatggccacatgtgataagatcttttggccttgtggagctaaaaaaattagaattgatggaaaaacaatggaaggtgatgattttgttagatgtaagtgcggacagttttatcctacaaaaataataaagaacggtgatttcacagtactaactttctgcgccaatgattatgcagcaattgaaattggaatgtcgtacggagaacaatgcagaaattgcaaaaaaacgtacaggtattatagagctgcaaatggatttgaaggagacacaagatcttggtggagaactgataaattatgtgtacaatgtactccatacaaagaattatgcagaataatgatggcaggtaagcagatcagattcattgaaaataactataaggaaatgaaagctaactttgggagacggatcagacgagagaacagatcaaatctagcaattaaagaagtaaattcaccatctattgtctacaaacttgaggttgtagagaaatcaagcgaatggcacaattcaacatctgaaatgttgacagcaattaatctcatttataggggagaattcaagactgatgcactagatagggacatagtcgtattaagctcactttatggaagaaggattttcaaatccgatagcacttcagaaatgttcaatctaatacgtacatacctaaaaaaaatgagtatgctctaa

SEQ ID NO: 15807 - DNA, 21 bp, unidentified
  misc_feature 1..21: note = Synthetic
  source 1..21: mol_type = other DNA
atgaagaagaagtacacgtag

SEQ ID NO: 15808 - DNA, 123 bp, unidentified
  source 1..123: mol_type = other DNA
  misc_feature 1..123: note = Synthetic
gtgttgcagatcaagaagaggcgccgcttcgcgcgttccaggtcgccgtcgcgcgccgcctgttccagcaccaggaagatgacgcaccacagggagcgcccccagtgccgcggctccatttaa

SEQ ID NO: 15809 - DNA, 39 bp, unidentified; identical to SEQ ID NO: 9122
  misc_feature 1..39: note = Synthetic
  source 1..39: mol_type = other DNA

SEQ ID NO: 15810 - DNA, 39 bp, unidentified; identical to SEQ ID NO: 9122
  misc_feature 1..39: note = Synthetic
  source 1..39: mol_type = other DNA

SEQ ID NO: 15811 - DNA, 378 bp, unidentified
  misc_feature 1..378: note = Synthetic
  source 1..378: mol_type = other DNA
atgagcacaaatcctaaacctcaaagaaaaccaaaagaaacaccaaccgtcgcccacaagacgttaagtttccgggcggcggccagatcgttggcggagtatacttgttgccgcgcaggggccccaggttgggtgtgcgcgcgacaaggaagacttcggagcggtcccagccacgtggaaggcgccagcccatccctaaagatcggcgctccactggcaaatcctggggaaaaccaggatacccctggcccctatacgggaatgagggactcggctgggcaggatggctcctgtccccccgaggttcccgtccctcttggggccccaatgacccccggcataggtcgcgcaacgtgggtaaggtcatcgataccctaa

SEQ ID NO: 15812 - DNA, 39 bp, unidentified; identical to SEQ ID NO: 9122
  source 1..39: mol_type = other DNA
  misc_feature 1..39: note = Synthetic

SEQ ID NO: 15813 - DNA, 39 bp, unidentified; identical to SEQ ID NO: 9122
  source 1..39: mol_type = other DNA
  misc_feature 1..39: note = Synthetic

SEQ ID NO: 15814 - DNA, 39 bp, unidentified; identical to SEQ ID NO: 9122
  misc_feature 1..39: note = Synthetic
  source 1..39: mol_type = other DNA

SEQ ID NO: 15815 - DNA, 18 bp, unidentified
  source 1..18: mol_type = other DNA
  misc_feature 1..18: note = Synthetic
attggggtgatcctgtag

SEQ ID NO: 15816 - DNA, 45 bp, unidentified; identical to SEQ ID NO: 9146
  misc_feature 1..45: note = Synthetic
  source 1..45: mol_type = other DNA

SEQ ID NO: 15817 - DNA, 42 bp, unidentified; identical to SEQ ID NO: 9147
  misc_feature 1..42: note = Synthetic
  source 1..42: mol_type = other DNA

SEQ ID NO: 15818 - DNA, 21 bp, unidentified
  misc_feature 1..21: note = Synthetic
  source 1..21: mol_type = other DNA
atgtttgtaaagggccgctaa

SEQ ID NO: 15819 - DNA, 4152 bp, unidentified
  source 1..4152: mol_type = other DNA
  misc_feature 1..4152: note = Synthetic
ataagcatgctaaaaacaacatctacccaaattcaaaatacaacaaaattcagtaatcgaatcatgcgcaagatgttgatacagaattaccaagactgtaatcctgtagaaactgctaatggtccgattatgattttccaaccaaataaagagttgatcttaactcccaaaacatatgcttgtagaatggattgttcaatctctttggataaagaagaagcaacaataattctgcattcagataaactgaaccattatgaagtcatgggaacaacaactgcaacaaggtggtttcaagggagtacaagctattctcttgaacatacatgtgagcatgttcaagtgacttgtggatcgaaaacattaaactttcatgcatgtttcaaatatcatatggcatgcatccggcttttgaacaagagctatatgcctgcatttgtgattcaatctgtttgcagaaacaaagaaataatacttatgacatgcttaatattgatcatatttggattattgtatgtcttgacattgtcatacatttgctacatcctattgccactattcatacctattgcatacttttatggttggatctacaatagatcgtgtaaaaaatgccagtattgtgggttagcattccatccatttagtaaatgtgggaagaactgtgtctgtggctcaatgtttgaaaattcagaacggatgaaaatgcacagaactgcagggctttgcaaaggttataaatctttgagagcggctagaattttatgcaaaagcaaggggtctgcttttgttctagcagtattgttggctacattgctactctcattcatacagcccttggaggcagtaaaattaaactacaatgggacagcaattgaattgccagaactctcacacgaacttgatttaatctttcagaatatggaaacaaaaacagttatccttatagtacagatttcttttctagtagccacattgctatcacttttgattatgtatgtattctcaaagaagattgaagatgtcctgatatctagatacttgtactactgtaaagaatgcgagatgacacatcctaagagcggcttaaaatattacttcaatggagaattcacaaatatgtgtaactcatgcatgtgtggatgtgtctatgatcaaacagaacttaattctcaagatggatatatggttccaatgacacacagattaacaattggatgttatgcccctgcaagatattatacattacggaaaatgacaaacataagctacaatctagttgtgtttctgttggtaatatttatatcactttctattgcagcagctgaaacatgctccaaagacaactattataaagtttcagaaccagtctcatgctcagtttggttaaaatcaagtgaatgtactcaatctagcactttagatgctttgataactagagtcaaattaccccaggcagataaggatcaaattaaatctattaaaacatctttcctggagctaatgatcagatctcaggaatcgacaagcccaattggatcttatgtaatggaagatcttgccttaacattatattgtaaagacattgttaagatgaatcaagaaagtggggaatataatcatcagatgagagtactattcactggtaaagaattagagatttgcctgaatgggaaaatagccaaagcatgcaattgtatagttggaaggcaaaactgtgattactcatctttagatgaagttacagcattttatggatcacacaaagaaatgtttaaaacagatacagctagaatgattcaggcattatccaaaatattccctggcatactcgcaaaggaactgttgatagcatcaagagcatcaaattactctagagtggttgtcatcctgaagcttttagaacccaaattggtgaatgctaaatcgataattgctattgtgaaaattctagaaaaggcactatcagacagcacgatcagtgcaataaaaatgccagaatcctcagttaaagaagttaaaccatttgatgctgagtggggtaaaacaagtatctttgacaatatgcagacatctacagacaaaaagacatgtacaaatgcaaagttgtataaatgtttttacccggtaagtttgaaatttacatttttcgtgaaatgtgaagaagagaataaattttacacttctggagaatatttagttgcaacacattactcaacgccaaccagtttctgtgttgctgatccatattgtgagctagattttaaaggaatcagtgtagatagaaaagaagaactgcagacttacagatgcatccaagagacattgaaccaacaggagaacgataattcaagacccattaataaatgtaaagtggtatctacacaatcctgcactgttggcaacactgcaaacagaagtgtagcagaatgtgacaatggatacttttatgagtatgttggagagatccatcaaagcccaaaagataatgttggtgtttactgctttgaaaaaggctgcaaacaaaataggttcccacatcacttggataatgtaaaaggctgcacatcacataatctagcaatgatcagtagaaaactaaaagagatcaattattctaacttggaacagttgaagcatagtatgcaagaggcaataaaaacagacctagtggagcacaattatatccccacaaagaacttacctaagataacaccttcctttaaggctttatccatacatggtgttgaaacagagcagggcatagaaagttcttacatagagacaaatctactagtaagaacaggagtttcgtcaggtctacatttgacgacaaaaaatggcgaaccattatttgacttgatactctttgtcaaaacagcacactatgaagctacatatgaagaaatttataaaacagggccaactgtaggaataaatatgcaacacaatgaaaagtgcacagggagttgtccgcaaaacatgtccaagataggctggttatcgttctctaaagagcatactagccaatggggttgcgaagaatttggatgtcttgcagtcaatgagggttgtgtttatggtcattgcagagatttaatcaaaccagacataacagttataagaaaggcacaagaagaagaacctgtcattaaaatatgttttacattaccccaagaatcattatgccaaaatattaattcatttacgccgatagtgacagagaaatttgaagtccaatttttgtctaatgaagctgggaagattccaaagcttttagcatataaatcgcataagatatttgctggaatgataaatgatcttgggactttctcaaaaatgtgtggaagcgtgcaacagacaccccgtggagtcctaggtgcaggcattcctcgatttgactacttatgccatgctgccaagaggaaggatataactataagcaggtgttttgacaatttctatgaatcgtgctcactgttagaaacaagagatgacatagtttacgattcatcgactaatagagtgtcactgttaaataaaaacatgggtgaactaagagttaaaataaaattgggagatatcaattataagctatttgaaaaaaccccatcatttgacttgaaaggatcctgtgttggctgcattaattgtattcggggagtggattgtgaattggagatcattgctagtggagagtcagtatgtatattgagctctaattgtgctttttatcacaacaatctccgcatagatccgaatgttcaaaaatatggactgaaagcaaaatgtacacaggaacatatctggatagagctctgtgggaataaaatagaggttcaaattagcatcacaaaaacatcagaaactattgaagtggggaacagcgatcagacttactttgttaaggagcatgacattcgatgtgggacatggctttgcaaagtgagtgagcaagggataagttccatttttgcaccattttttgcagtgtttgggacatatgggaaaatagcattctattctgtcttgggagtattgcttgcagcactaatcatatatctatctctccccataattgggaagataaaagatacattgaagaaaaatgaatacgaatacctgaaggagacaatcgggaagagaagataa

SEQ ID NO: 15820 - DNA, 15 bp, unidentified
  source 1..15: mol_type = other DNA
  misc_feature 1..15: note = Synthetic
atgttccgcttttga

SEQ ID NO: 15821 - DNA, 351 bp, unidentified
  source 1..351: mol_type = other DNA
  misc_feature 1..351: note = Synthetic
atgattcgctgcttgaggctgaaggtggagggcgctctggagcagatttttacaatggccggacttaatattcgggatttgcttagagacatattgataaggtggcgagatgaaaattatttgggcatggttgaaggtgctggaatgtttatagaggagattcaccctgaagggtttagcctttacgtccacttggacgtgagggcagtttgccttttggaagccattgtgcaacatcttacaaatgccattatctgttctttggctgtagagtttgaccacgccaccggaggggagcgcgttcacttaatagatcttcattttgaggttttggataatcttttggaataa

SEQ ID NO: 15822 - DNA, 39 bp, unidentified; identical to SEQ ID NO: 9122
  source 1..39: mol_type = other DNA
  misc_feature 1..39: note = Synthetic

SEQ ID NO: 15823 - DNA, 378 bp, unidentified
  source 1..378: mol_type = other DNA
  misc_feature 1..378: note = Synthetic
atgagcacgaatcctaaacctcaaagaaaaccaaaagaaacaccaaccgccgcccacaggacgtcaagttcccgggcggtggtcagatcgttggtggagtttacttgttgccgcgcaggggccctaaattgggtgtgcgcgcgactcggaagaattcggaacggtcgcaaccccgtggacggcgccagcctattcccaaggcgcgccgacccacgggccggtcctggggtcaacccgggtacccttggcccctttacgccaatgaaggcctcgggtgggcagggtggttgctctccccccgaagctctcggcctaattggggccccaatgacccccggcggaaatcccccaatttgggtagggtcatccataccctaa

SEQ ID NO: 15824 - DNA, 39 bp, unidentified; identical to SEQ ID NO: 9122
  misc_feature 1..39: note = Synthetic
  source 1..39: mol_type = other DNA

SEQ ID NO: 15825 - DNA, 39 bp, unidentified; identical to SEQ ID NO: 9122
  misc_feature 1..39: note = Synthetic
  source 1..39: mol_type = other DNA

SEQ ID NO: 15826 - DNA, 480 bp, unidentified
  misc_feature 1..480: note = Synthetic
  source 1..480: mol_type = other DNA
acgaatcctaaacctcaaagaaaaccaaacgtaacaccaaccgtcgcccacaggacgtcaagttcccgggtggcggtcagatcgttggtggagtttacttgttgccgcgcaggggccctagattgggtgtgcgcgcgacgaggaagacttccgagcggtcgcaacctcgaggtagacgtcagcctatccccaaggcacgtcggcccgagggcaggacctgggctcagcccgggtacccttggcccctctatggcaatgagggttgcgggtgggcgggatggctcctgtctccccgtggctctcggcctagctggggccccacagacccccggcgtaggtcgcgcaatttgggtaaggtcatcgatacccttacgtgcggcttcgccgacctcatggggtacataccgctcgtcggcgcccctcttggaggcgctgccagggccctggcgcatggcgtccgggttctggaagacggcgtga

SEQ ID NO: 15827 - DNA, 480 bp, unidentified; identical to SEQ ID NO: 15826
  misc_feature 1..480: note = Synthetic
  source 1..480: mol_type = other DNA

SEQ ID NO: 15828 - DNA, 39 bp, unidentified; identical to SEQ ID NO: 9122
  misc_feature 1..39: note = Synthetic
  source 1..39: mol_type = other DNA

SEQ ID NO: 15829 - DNA, 39 bp, unidentified; identical to SEQ ID NO: 9122
  misc_feature 1..39: note = Synthetic
  source 1..39: mol_type = other DNA

SEQ ID NO: 15830 - DNA, 540 bp, unidentified
  source 1..540: mol_type = other DNA
  misc_feature 1..540: note = Synthetic
attaccaaaagaaacaccgtccgtcgcccacagaacgttaagttcccgggtggcgggcagatcgttggcggagtctacttgttgccgcgcaggggccctagattgggtgtgcgcggcactaggaagagttcggagcgatcgcagcccaggggaagacgccaacgtatccccaaagctgcctcttcacagggtaaagcctggggcaagcccgggtacccttggcccctgtatggtaacgagggctgtggctgggcagggtggctcctgtccccccgcggctctcgacctacttggggccccacygacccccggcaccgctcgcgaaacctcggtaaggtgatcgacaccatgacctgcgggtttgccgacctcatggggtacatccctgtcctaggcgcccccctagggggcgttgccagggctctggcacatggtgttagagttctggaggacggggtcaactatgcaacagggaacttgcctggttgctccttttctatcttcytactagccctcctgtcatgtctaacagtcccggca

SEQ ID NO: 15831 - DNA, 1104 bp, unidentified
  misc_feature 1..1104: note = Synthetic
  source 1..1104: mol_type = other DNA
ttgaagcatatgaagatggccccaaccaaaagaaaaggagagtgtccaggggcagctcccaaaaagccaaaggaacccgtgcaagtgccaaaactactaataaaaggaggagtagaagttctagaagttaaaactggggtagatgctattacagaggtagaatgcttcctaaacccagaaatgggggatccagatgaaaaccttaggggctttagtctaaagctaagtgctgaaaatgactttagcagtgatagcccagagagaaaaatgcttccctgttacagcacagcaagaattcccctccccaatttaaatgaggacctaacctgtggaaatctactgatgtgggaggctgtaactgtacaaacagaggttattggaataactagcatgcttaaccttcatgcagggtcacaaaaagtgcatgagcatggtggaggaaaacctattcaaggcagtaatttccacttctttgctgtaggtggagaacccttggaaatgcagggagtgctaatgaattacaggtcaaagtaccctgatggtactataacccctaaaaacccaacagcccagtcccaggtaatgaatactgaccataaggcctatttggacaaaaacaatgcttatccagttgagtgctgggtacctgatcccagtagaaatgaaaatgctaggtattttgggactttcacaggaggggaaaatgttcccccagtacttcatgtgaccaacacagctaccacagtgttgctagatgaacagggtgtggggcctctttgtaaagctgatagcctgtatgtttcagctgctgatatttgtggcctgtttactaacagctctggaacacaacagtggagaggccttgcaagatattttaagatccgcctgagaaaaagatctgtaaagaatccttacccaatttcctttttgctaagtgaccttataaacaggagaacccagagagtggatgggcagcctatgtatggtatggaatcccaggtagaagaggttagggtgtttgatggcacagaaagacttccaggggacccagatatgataagatatattgacaaacagggacaattgcaaaccaaaatgctttaa

SEQ ID NO: 15832 - DNA, 12 bp, unidentified
  source 1..12: mol_type = other DNA
  misc_feature 1..12: note = Synthetic
atgggagcttaa

SEQ ID NO: 15833 - DNA, 12 bp, unidentified
  source 1..12: mol_type = other DNA
  misc_feature 1..12: note = Synthetic
atgggagcttaa

SEQ ID NO: 15834 - DNA, 162 bp, unidentified; identical to SEQ ID NO: 9159
  source 1..162: mol_type = other DNA
  misc_feature 1..162: note = Synthetic

SEQ ID NO: 15835 - DNA, 1677 bp, unidentified
  source 1..1677: mol_type = other DNA
  misc_feature 1..1677: note = Synthetic
acgctcggatcaccctttattatggcacgatcgggattggataggatcgacataagcccccagccagccaaaaaaattgcccgtgtgggaggtctacagcacccttttgtaaaaacggatattaacacgattaacgttgaacaccattttatagacacgctacagaagacatcaccgaacatggactgtcgcgggatgacagcgggtatttttattcgtttatcccacatgtataaaattctaacaactctggagtctccaaatgatgtaacctacacaacacccggttctaccaacgcactgttctttaagacgtccacacagcctcaggagccgcgtccggaagagttagcatccaaattaacccaagacgacattaaacgtattctattaacaatagaatcggagactcgtggtcagggcgacaatgccatttggacactactcagacgaaatttaatcaccgcatcaactcttaaatggagtgtatctggacccgtcattccacctcagtggttttaccaccataacactacagacacatacggtgatgcggcggcaatggcgtttggaaaaaccaacgaaccggcggcacgagcgatagttgaagcattgtttatagatccggctgatatccgtactcctgatcatttaacgccagaagctacaactaagttttttaattttgacatgctcaataccaaatctccaagtctccttgtgggtacaccaagaatcggaacgtatgaatgtggacttttaatcgacgttcgaacgggacttataggcgcgtcgttggacgttcttgtatgtgacagggaccctttaactggcaccctaaatccccaccctgcagaaaccgacatttcattttttgaaattaaatgtcgtgctaaatacctctttgatccagatgacaaaaataacccgctcggtcggacgtacaccacgttaataaatagacctacaatggcaaatctacgggactttttatatactataaaaaacccatgtgtaagcttctttggaccctcagcaaacccaagtacacgcgaggccttaataacggatcacgttgaatggaaacgtttaggatttaaaggtgggagggcccttacagaactcgacgcccatcatttgggcctcaatcggacaatctcatcccgagtgtgggtatttaatgatccggacatacaaaaggggacaattacaaccattgcatgggccactggagatacggctcttcaaattcctgtatttgccaatccgcggcacgctaactttaaacaaattgccgtacaaacctatgtattatccggttactttccagcgctaaaactacggcccttccttgtcacctttataggacgtgtgcgccgaccacacgaggtgggagtcccattgcgcgtcgatacacaagcggctgccatttacgaatataactggccgactatcccaccccactgtgcggttccggttatagccgttctaacgcctatcgaagttgatgtgcctagagtgacacaaatacttaaagacacaggaaacaacgcgattacatcagcattgcggtcattgcgatgggacaatcttcatccagcggtcgaggaggaatctgtggattgtgcaaacggtacaacgagcttgttacgtgcaacggagaaaccgttgctttga

SEQ ID NO: 15836 - DNA, 15 bp, unidentified
  source 1..15: mol_type = other DNA
  misc_feature 1..15: note = Synthetic
gtgatgaacatataa

SEQ ID NO: 15837 - DNA, 798 bp, unidentified
  misc_feature 1..798: note = Synthetic
  source 1..798: mol_type = other DNA
atggaagacatcaatttttcgtcgctggccccgcgacacggcacgcggccgtacatgggcacctggaacgagatcggcacgagccagctgaacgggggcgccttcaattggaacagtatctggagcggtcttaaaaattttggttccacgattaagacatatggcaccaaggcgtggaacagccaaaccggccagatgctaagggacaagttaaaagaccaaaattttcaacagaaagttgtagatggtctggcttcgggaattaatggagttgtagacatagccaatcaggctgtacagaaaaaaattgccaaccgtttagagccgcggcccgacgaggtaatggtagaggaaaagctgccacctctagaaactgtgcccggatccgttccaaccaaaggagaaaagcggccacggccggatgcagaggaaaccttagtaacgcacacaacagaaccgccgtcctatgaggaagcaataaaacaaggagccgctctgtcacctaccacctatcccatgaccaagcctattttacccatggctactagagtgtatggaaaaaacgaaaatgtgcctatgacccttgagctgcctcctttgccagaacccactatcgcggatcccgtaggttccgttcctgttgcatctgttccagttgcatcgacagtgagccgtccagcagtgcggcctgttgccgtggctagcttgcgaaacccacgatccagtaattggcaaagtaccctaaacagtattgtgggactgggagtaaagtctctcaaacgccgacgctgctactaa

SEQ ID NO: 15838 - DNA, 159 bp, unidentified; identical to SEQ ID NO: 14369
  misc_feature 1..159: note = Synthetic
  source 1..159: mol_type = other DNA

SEQ ID NO: 15839 - DNA, 288 bp, unidentified
  misc_feature 1..288: note = Synthetic
  source 1..288: mol_type = other DNA
atgtcgttgtacatggctatttcaccgaagtttactaccagcttgagtctacacaaattactacagacactggtattgaaaatgctacattcttcatctttaacaagcttgttaaagacccaccgaatgtgcaaatacacacaatcgacggctcttcaggagttgctaatccagcaatggatccaatttatgatgagccgacgacgactactagcgtgcctttgtaagcacaagaaagtgagtacgaacttatgtactcattcgtttcggaagaaacaggtacgttaa

SEQ ID NO: 15840 - DNA, 48 bp, unidentified; identical to SEQ ID NO: 9174
  source 1..48: mol_type = other DNA
  misc_feature 1..48: note = Synthetic

SEQ ID NO: 15841 - DNA, 45 bp, unidentified; identical to SEQ ID NO: 9175
  misc_feature 1..45: note = Synthetic
  source 1..45: mol_type = other DNA

SEQ ID NO: 15842 - DNA, 1080 bp, unidentified
  misc_feature 1..1080: note = Synthetic
  source 1..1080: mol_type = other DNA
ttgaagcatatgaagatggccccaacaaaaagaaaaggagaaaggaaggaccccgtgcaagttccaaaacttcttataagaggaggagtagaagttctagaagttaaaactggggttgactcaattacagaggtagaatgctttttaactccagaaatgggtgacccagatgagcatcttaggggttttagtaagtcaatatctatatcagatacatttgaaagtgactccccaaatagggacatgcttccttgttacagtgtggccagaattccactacccaatctaaatgaggatctaacctgtggaaatatactcatgtgggaggctgtgaccttaaaaactgaggttataggggtgacaagtttgatgaatgtgcactctaatgggcaagcaactcatgacaatggtgcagggaagccagtgcagggcaccagctttcattttttttctgttgggggggaggctttagaattacagggggtgctttttaattacagaacaaagtacccagatggaacaatttttccaaagaatgccacagtgcaatctcaagtcatgaacacagagcacaaggcgtacctagataagaacaaagcatatcctgttgaatgttgggttcctgatcccaccagaaatgaaaacacaagatattttgggacactaacaggaggagaaaatgttcctccagttcttcatataacaaacactgccacaacagtgttgcttgatgaatttggtgttgggccactttgcaaaggtgacaacttatacttgtcagctgttgatgtctgtggcatgtttacaaacaggtctggttcccagcagtggagaggactctccagatattttaaggtgcagctaaggaaaaggagggttaaaaacccctacccaatttctttccttcttactgatttaattaacagaaggactcctagagttgatgggcagcctatgtatggcatggatgctcaagtagaggaggttagagtttttgagggaacagaggagcttccaggggacccagacatgatgagatacgttgacaaatatggacagttgcagacaaaaatgctgtaa

SEQ ID NO: 15843 - DNA, 1758 bp, unidentified
  misc_feature 1..1758: note = Synthetic
  source 1..1758: mol_type = other DNA
atggacccgtactaccctttcgacgcgctggacgtttgggaacacaggcgcttcatcgtcgccgactccaggagcttcatcacccccgagttcccccgggacttctggatgttgcccgtgttcaacatcccccgggagacggcggcggagcgggcggcagtgctgcaggcccagcgcaccgcggccgcggcggccctggagaacgccgccctccaggccgccgagctgcccgtcgacatcgagcgccggatacgcccgatcgagcagcaggtgcatcacatcgccgacgccctggaggcgctggagaccgcggcggccgcggccgaagaggcggatgccgcgcgggacgccgaggcgaggggggagggcgctgcggacggggcagcgccgtcgcccaccgcgggccccgccgccgcggagatggaggttcagatcgtacgcaacgacccgccgctacgatacgataccaacctccccgtggatctgctacacatggtgtacgcgggccgcggggccgcgggttcgtcgggagtcgtctttggtacctggtaccgcacgatccaggaacgcaccatcgcggacttccccctgaccacccgcagcgccgactttcgagacgggcgcatgtccaagaccttcatgaccgcgctggtcctgtctctgcagtcgtgcggccggctgtacgtgggccagcgccactattccgccttcgagtgcgccgtgctgtgtctgtatctgctgtaccgaaccacccacgagtcctcccccgatcgcgatcgcgctcccgttgcgttcggggacctgctggcccgcctgccgcgctacctggcgcgtctggccgcggtaatcggcgacgagagcggacgcccgcagtaccgctaccgcgacgacaagctgcccaaagcgcagttcgcggcggccggcggccgctacgagcacggggccctggccacccacgtcgtgatcgccacgttggtgcgccacggggtgctaccggcggccccgggcgacgttccccgagacaccagcacccgcgtgaaccccgacgacgtggcccaccgcgacgacgtcaaccgcgccgccgccgcgtttttggcacgcggccacaacctcttcctgtgggaggaccagacgctgctgcgggcgaccgccaacaccattacggccctggccgtgcttcggcggctcctcgcgaacggcaacgtgtacgcggaccgcctcgacaaccgcctgcagctgggcatgctgatcccgggagccgtcccggcggaggccatcgctcggggggcgtccggattggactcgggcgccataaaaagcggcgacaacaacctggaggcgctgtgcgttaactatgtacttccgctgtatcaggcagaccccacggtcgagctgacccagttgtttccggggctggccgccctgtgcctggacgcccaggcggggcggccactggcgtcgacgaggcgcgtggtggatatgtcgtcgggcgcccgccaggcggcgctcgtgcgcctcaccgcgctggagctcatcaaccgcacccgcacaaacaccacccctgtgggggagattattaacgcccacgatgccttggggatacaatacgaacagggcctggggctgctcgcccagcaggcacgcatcggcttggcgtcaaacaccaagcgattcgccacgttcaacgtgggcagcgactacgacctgttgtactttttgtgtctcgggttcattccccagtacctgtccgtggcctag

SEQ ID NO: 15844 - DNA, 39 bp, unidentified; identical to SEQ ID NO: 9180
  misc_feature 1..39: note = Synthetic
  source 1..39: mol_type = other DNA

SEQ ID NO: 15845 - DNA, 10176 bp, unidentified
  source 1..10176: mol_type = other DNA
  misc_feature 1..10176: note = Synthetic
acgaagacgcgtcaacccagagtccaaatgccaaatgggcttgtgttgatgcgcatgatggggatcttgtggcatgccgtagccggcaccgcgagaaaccccgtattgaaggcgttctggaactcagtccctctgaaacaggcaacagcagcactgcggaagatcaaaaggacggtgagtgccctaatggttggcttgcaaaaacgtgggaaaaggaggtcagcgacggactggatgagctggttgctggtcatcactctgttggggatgacgcttgctgcaacggtgaggaaagaaagggatggctcaactgtgatcagagctgaaggaaaggatgcagcaactcaggtgcgtgtggagaatggcacctgtgtgatcctggctactgacatggggtcatggtgtgatgattcactgtcctatgagtgtgtgaccatagatcaaggagaagagcctgttgacgtggattgtttttgccggaacgttgatggagtctatctggagtacggacgctgtgggaaacaggaaggctcacggacaaggcgctcagtgctgatcccatcccatgctcagggagagctgacgggaaggggacacaaatggctagaaggagactcgctgcgaacacaccttactagagttgagggatgggtctggaagaacaagctacttgccttggcaatggttaccgttgtgtggttgaccctggagagtgtggtgaccagggttgccgttcttgttgtgctcctgtgtttggcaccggtttacgcttcgcgttgcacacacttggaaaacagggactttgtgactggtactcaggggactacgagggtcaccttggtgctggaactgggtggatgtgttactataacagctgaggggaagccttcaatggatgtgtggcttgacgccatttaccaggagaaccctgctaagacacgtgagtactgtttacacgccaagttgtcggacactaaggttgcagccagatgcccaacaatgggaccagccactttggctgaagaacaccagggtggcacagtgtgtaagagagatcagagtgatcgaggctggggcaaccactgtggactgtttggaaagggtagcattgtggcctgtgtcaaggcggcttgtgaggcaaaaaagaaagccacaggacatgtgtacgacgccaacaaaatagtgtacacggtcaaagtcgaaccacacacgggagactatgttgccgcaaacgagacacatagtgggaggaagacggcatccttcacaatttcttcagagaaaaccattttgactatgggtgagtatggagatgtgtctttgttgtgcagggtcgctagtggcgttgacttggcccagaccgtcatccttgagcttgacaagacagtggaacaccttccaacggcttggcaggtccatagggactggttcaatgatctggctctgccatggaaacatgagggagcgcaaaactggaacaacgcagaaagactggttgaatttggggctcctcacgctgtcaagatggacgtgtacaacctcggagaccagactggagtgttactgaaggctctcgctggggttcctgtggcacacattgagggaaccaagtaccacctgaagagtggccacgtgacctgcgaagtgggactggaaaaactgaagatgaaaggtcttacgtacacaatgtgtgacaaaacaaagttcacatggaagagagctccaacagacagtgggcatgatacagtggtcatggaagtcacattctctggaacaaagccctgtaggatcccagtcagggcagtggcacatggatctccagatgtgaacgtggccatgctgataacgccaaacccaacaattgaaaacaatggaggtggcttcatagagatgcagctgcccccaggggataacatcatctatgttggggaactgagtcatcaatggttccaaaaagggagcagcatcggaagggttttccaaaagaccaagaaaggcatagaaagactgacagtgataggagagcacgcctgggacttcggttctgctggaggctttctgagttcaattgggaaggcggtacatacggtccttggtggcgctttcaacagcatcttcgggggagtggggtttctaccaaaacttttattaggagtggcattggcttggttgggcctgaacatgagaaaccctacaatgtccatgagctttctcttggctggaggtctggtcttggccatgacccttggagtgggggcggatgttggttgcgctgtggacacggaacgaatggagctccgctgtggcgagggcctggtcgtgtggagagaggtctcagaatggtatgacaattatgcctactacccggagacaccgggggcccttgcatcagccataaaggagacatttgaggagggaagctgtggtgtagtcccccagaacaggctcgagatggccatgtggagaagctcggtcacagagctgaatttggctctggcggaaggggaggcaaatctcacagtggtggtggacaagtttgaccccactgactaccgaggtggtgtccctggtttactgaaaaaaggaaaggacataaaagtctcctggaaaagctggggccattcaatgatctggagcattcctgaggccccccgtcgcttcatggtgggcacggaaggacaaagtgagtgtcccctagagagacggaagacaggtgttttcacggtggcagaattcggggttggcctgagaacaaaggtcttcttggatttcagacaggaaccaacacatgagtgtgacacaggagtgatgggagctgcagtcaagaacggcatggcaatccacacagatcaaagtctctggatgagatcaatgaaaaatgacacaggcacttacatagttgaacttttggtcactgacctgaggaactgctcatggcctgctagccacactatcgataatgctgacgtggtggactcagagttattccttccggcgagcctggcaggacccagatcctggtacaacaggatacctggctattcagaacaggtgaaagggccatggaagtacacgcctatccgagttatcagagaggagtgtcccggcacgaccgttaccatcaacgccaagtgtgacaaaagaggagcatctgtgaggagtaccacagagagtggcaaggttatcccagaatggtgctgccgagcgtgcacaatgccaccagtgacgttccggactggaactgattgctggtatgccatggaaatacggccagtccatgaccagggggggcttgttcgctcaatggtggttgcggacaacggtgaattacttagtgagggaggagtccccggaatagtggcattgtttgtggtccttgaatacatcatccgtaggaggccctccacgggaacgacggttgtgtgggggggtatcgtcgttctcgctctgcttgtcaccgggatggtcaggatagagagcctggtgcgctatgtggtggcagtggggatcacattccaccttgagctggggccagagatcgtggccttgatgctactccaggctgtgtttgagctgagggtgggtttgctcagcgcatttgcattgcgcagaagcctcaccgtccgagagatggtgaccacctactttcttttgctggtcctggaattggggctgccgggtgcgagccttgaggagttctggaaatggggtgatgcactggccatgggggcgctgatattcagggcttgcacggcagaaggaaagactggagcggggcttttgctcatggctctcatgacacagcaggatgtggtgactgtgcaccatggactggtgtgcttcctaagtgtagcttcggcatgctcggtctggaggctgctcaagggacacagagagcagaagggattgacctgggttgtccccctggctgggttgcttgggggagagggctctggaatcagactgctggcgttttgggagttgtcagcgcacagaggaagacgatctttcagtgaaccactaactgtggtaggagtcatgctaacactggccagcggcatgatgcgacacacttcccaggaggctctctgtgcactcgcagtggcctcgtttctcttgctgatgctggtgctggggacaagaaagatgcagctggttgccgaatggagtggctgcgttgaatggtatccggaactagtgaatgagggtggagaggttagcctgcgggtccggcaggacgcgatgggtaactttcacttgactgagctcgagaaagaagagagaatgatggctttttggctgattgccggcttggcagcttcggccattcactggtcaggcattcttggtgtgatgggactgtggacgctcacggaaatgctgaggtcatcccgaaggtctgacctggttttctctggacaggggggtcgagagcgtggtgacagacctttcgaggttaaggacggtgtctacaggatttttagccccggcttgttctggggtcagaaccaggtgggagttggctacggttccaagggtgtcttgcacacgatgtggcacgtgacgagaggagcggcgctgtctattgatgacgctgtggccggtccctactgggctgatgtgagggaagatgtcgtgtgttacggaggagcctggagcctggaggaaaaatggaaaggtgaaacagtacaggtccatgccttcccaccggggagggcgcatgaggtgcatcagtgccagcctggggagttgatccttgacaccggaagaaagcttggggcaataccaattgatttggtgaaaggaacatcaggcagccccattctcaacgcccagggagtggttgtggggctatacggaaatggcctaaaaactaatgagacctacgtcagcagcattgctcaaggggaagcggagaagagtcgccccaacctcccacaggctgttgtgggtacgggctggacatcaaagggtcagatcacagtgctggacatgcacccaggctcggggaagacccacagagtcctcccggagctcattcgccaatgcattgacaggcgcctgagaacgttggtgttggctccaactcgtgtggtactcaaagaaatggagcgtgctttgaatgggaaacgggtcaggttccactcaccagcagtcagtgaccaacaggctggaggggcaattgtcgatgtgatgtgtcacgcaacctatgtcaacagaaggctactcccacagggaagacaaaattgggaggtggcaatcatggatgaggcccactggacggacccccacagcatagctgccagaggtcatttgtatactctggcaaaagaaaacaagtgtgcactggtcttgatgacagcgacacctcctggtaagagtgaaccctttccggagtccaatggagccattactagtgaggaaagacagattcctgatggggagtggcgtgacgggtttgactggatcactgagtatgaagggcgcaccgcctggtttgtcccttcgattgcaaaaggtggtgctatagctcgcaccttgagacagaaggggaaaagtgtgatttgtttgaacagcaaaacctttgaaaaggactactccagagtgagggatgagaagcctgactttgtggtgacgactgatatctcggagatgggagctaaccttgacgtgagccgcgtcatagatgggaggacaaacatcaagcccgaggaggttgatgggaaagtcgagctcaccgggaccaggcgagtgaccacggcttccgctgcccaacggcgcggaagagttggtcggcaagacggacgaacagatgaatacatatactctggacagtgtgatgatgatgacagtggattagtgcaatggaaagaggcgcaaatacttcttgacaacataacaaccttgcgggggcccgtggccaccttctatggaccagaacaggacaagatgccggaggtggccggtcactttcgactcactgaagagaaaagaaagcacttccgacatcttctcacccattgtgacttcacaccgtggctggcatggcacgtcgcagcgaatgtatccagcgtcacggatcgaagctggacatgggaagggccggaggcaaatgccgtggatgaggccagtggtgacttggtcacctttaggagcccgaatggggcggagagaactctcaggccggtgtggaaggacgcacgtatgttcaaagagggacgtgacatcaaagagttcgtggcgtacgcgtctgggcgtcgcagcttcggagatgttctgacaggaatgtcgggagttcctgagctcctgcggcacagatgcgtcagtgccctggatgtcttctacacgcttatgcatgaggaacctggcagcagggcaatgagaatggcggagagagatgccccagaggcctttctgactatggttgagatgatggtgctgggtttggcaaccctgggtgtcatctggtgcttcgtcgtccggacttcaatcagccgcatgatgctgggcacgctggtcctgctggcctccttgctactcttgtgggcaggtggcgtcggctatgggaacatggctggagtggctctcatcttttacacgttgctgacggtgctgcagcctgaggcgggaaaacagagaagcagtgacgacaacaaactggcatatttcttgctgacgctctgcagccttgctggactggttgcagccaatgagatgggctttctggagaagaccaaggcagacttgtccacggcgctgtggagtgaacgggaggaaccccggccatggagtgaatggacgaatgtggacatccagccagcgaggtcctgggggacctatgtgctggtggtgtctctgttcacaccttacatcatccaccaactgcagaccaaaatccaacaacttgtcaacagtgccgtggcatctggtgcacaggccatgagagaccttgggggaggtgcccccttctttggtgtggcgggacatgtcatgaccctcggggtggtgtcactgattggggctactcccacctcactgatggtgggcgttggcttggcggcactccatctggccattgtggtgtctggtctggaggctgaattaacacagagagctcataaggtctttttctctgcaatggtgcgcaaccccatggtggatggggatgtcatcaacccattcggggagggggaggcaaaacctgctctatatgaaaggaaaatgagtctggtgttggccacagtgttgtgcctcatgtcggtggtcatgaaccgaacggtggcctccataacagaggcttcagcagtgggactggcagcagcgggacagctgcttagaccggaggctgacacgttgtggacgatgccggttgcttgtggcatgagtggtgtggtcaggggtagcctgtgggggtttttgcctcttgggcatagactctggcttcgagcctctgggggtaggcgtggtggttctgagggagacacgcttggagatctctggaagcggaggctgaacaactgcacgagggaggaattctttgtgtacaggcgcaccggcatcctggagacggaacgtgacaaggctagagagttgctcagaagaggagagaccaatgtgggattggctgtctctcggggcacggcaaagcttgcctggcttgaggaacgcggatatgccaccctcaagggagaggtggtagatcttggatgtggaaggggcggctggtcctattatgcggcatcccgaccggcagtcatgagtgtcagggcatataccattggtggaaaagggcacgaggctccaaagatggtaacaagcctgggttggaacttgattaaattcagatcaggaatggacgtgttcagcatgcagccacaccgggctgacactgtcatgtgtgacatcggagagagcagcccagatgccgctgtggagggtgagaggacaaggaaagtgatactgctcatggagcaatggaaaaacaggaaccccacggctgcctgtgtgttcaaggtgctggccccatatcgcccagaagtgatagaggcactgcacagattccaactgcaatggggggggggtctggtgaggacccctttttcaaggaactccacccatgagatgtattactcaacagccgtcactgggaacatagtgaactccgtcaatgtacagtcgaggaaacttttggctcggtttggagaccagagagggccaaccaaggtgcctgaactcgacctgggagttggaacgaggtgtgtggtcttagctgaggacaaggtgaaagaacaagacgtacaagagaggatcagagcgttgcgggagcaatacagcgaaacctggcatatggacgaggaacacccgtaccggacatggcagtactggggcagctaccgcacggcaccaaccggctcggcggcgtcactgatcaatggggttgtgaaacttctcagctggccatggaacgcacgggaagatgtggtgcgcatggctatgactgacacaacggctttcggacagcagagagtgttcaaagataaagttgacacaaaggcacaggagcctcagcccggtacaagagtcatcatgagagctgtaaatgattggattttggaacgactggcgcagaaaagcaaaccgcgcatgtgcagcagggaagaattcatagcaaaagtgaaatcaaatgcagccttgggagcttggtcagatgagcaaaacagatgggcaagtgcaagagaggctgtagaggatcctgcattctggcgcctcgtggatgaagagagagaaaggcacctcatggggagatgtgcgcactgcgtgtacaacatgatgggcaagagagaaaagaaactgggagagttcggagtggcgaaaggaagtcgggccatttggtacatgtggctggggagtcgctttttggagttcgaggctcttggattcttgaatgaagaccattgggcctctagagagtccagtggagctggagttgagggaataagcttgaactacctgggctggcacctcaagaagttgtcaaccctgaatggaggactcttctatgcagatgacacagctggctgggacacgaaagttaccaatgcagacttagaggatgaagaacagatcctacggtacatggagggtgagcacaaacaattggcaaccacaataatgcaaaaagcataccatgccaaagtcgtgaaggtcgcgaggccttcccgtgatggaggctgcatcatggatgtcatcacaagaagagaccaaagaggttcgggtcaggttgtgacctatgcccttaacaccctcaccaacataaaggtgcaattaatccgaatgatggaaggggaaggggtcatagaggcagcggatgcacacaacccgagactgcttcgagtggagcgctggctgaaagaacacggagaagagcgtcttggaagaatgctcgtcagtggtgacgattgtgtggtgaggcccttggatgacagatttggcaaagcactttactttctgaatgacatggccaagaccaggaaggacattggggaatgggagcactcagccggcttttcaagctgggaggaggtacccttttgttcacaccatttccacgagctagtgatgaaggatggacgcaccctggtggtgccgtgccgagaccaagatgaactcgttgggagggcgcgcatctcaccggggtgcggctggagtgtccgcgagacggcctgcctttcaaaagcctacgggcagatgtggctgctgagctacttccaccgacgagacctgaggacgctcgggcttgccattaactcagcagtgcctgccgattgggttcctaccggccgcacgacgtggagcattcatgccagtggggcctggatgaccacagaagacatgctggacgtttggaaccgggtgtggattctggacaaccctttcatgcagaacaaggaaagggtcatggagtggagggatgttccgtacctccctaaagctcaggacatgttatgttcctcccttgttgggaggagagaaagagcagaatgggccaagaacatctggggagcggtggaaaaggtgaggaagatgataggtcctgaaaagttcaaggactatctctcctgtatggaccgccatgacctgcactgggagctcagactggagagctcaataatctaa

SEQ ID NO: 15846 - DNA, 276 bp, unidentified
  source 1..276: mol_type = other DNA
  misc_feature 1..276: note = Synthetic
atggacatattcgagaccttgagctcttactactccggagtgctgatatgcggcgtgctgctgctgacggccgcctgcgtcttcgccttcgtggatttcagcaagaacaccagcaacatcaccgactacgtgtggcgcgcgctgtgcgtaacctgcttcatagtgggcgccgtgctgctgctcgggctgttcgtgttcagcatgtacaggaagtgctccggcagcgtcccgtacgcccggctaaacaacaccgacattgagctcaccgcccggtaa

SEQ ID NO: 15847 - DNA, 33 bp, unidentified; identical to SEQ ID NO: 9185
  source 1..33: mol_type = other DNA
  misc_feature 1..33: note = Synthetic

SEQ ID NO: 15848 - DNA, 42 bp, unidentified; identical to SEQ ID NO: 9186
  misc_feature 1..42: note = Synthetic
  source 1..42: mol_type = other DNA

SEQ ID NO: 15849 - DNA, 10245 bp, unidentified; identical to SEQ ID NO: 10907
  source 1..10245: mol_type = other DNA
  misc_feature 1..10245: note = Synthetic

SEQ ID NO: 15850 - DNA, 1035 bp, unidentified
  misc_feature 1..1035: note = Synthetic
  source 1..1035: mol_type = other DNA
atgtggtatttatggcagggtggagtatttgttcagggccaggtagactttgacccattacgtggaggtttcgattaccgtgttttttacctgaatttccgcgtaccgtgtcaaagtcttctgtttttacgtaggtgtcagctgatcgctagggtatttatacctcagggtttgtgtcaagaggccactcttgagtgccagcgagaagagttttctcctctgcgccggcagtttaataataaaaaaatgagagatttgcgatttctgcctcaggaaataatctctgctgagactggaaatgaaatattggagcttgtggtgcacgccctgatgggagacgatccggagccacctgtgcagctttttgagcctcctacgcttcaggaactgtatgatttagaggtagagggatcggaggattctaatgaggaagctgtaaatggcttttttaccgattctatgcttttagctgctaatgaagggttagaattagatccgcctttggacacttttgatactccaggggtaattgtggaaagcggtacaggtgtaagaaaattacctgatttgagttccgtggactgtgatttgcactgctatgaagacgggtttcctccgagtgatgaggaggaccatgaaaaggagcagtccatgcagactgcagcgggtgagggagtgaaggctgccaatgttggttttcagttggattgcccggagcttcctggacatggctgtaagtcttgtgaatttcacaggaaaaatactggagtaaaggaactgttatgttcgctttgttatatgagaacgcactgccactttatttacagtcctgtgtctgatgctgatgaatcaccatctcctgattctactacctcacctcctgagattcaagcacctgttcctgtggacgtgcgcaagcccattcctgtgaagcttaagcctgggaaacgtccagcagtggaaaaacttgaggacttgttacagggtggggacggacctttggacttgagtacacggaaacgtccaagacaataa

SEQ ID NO: 15851 - DNA, 78 bp, unidentified
  misc_feature 1..78: note = Synthetic
  source 1..78: mol_type = other DNA
atgttaaatcctctacataatgatatagccattttcatagaatatacatcatccatcagtaaaaagtgtgataaataa

SEQ ID NO: 15852 - DNA, 144 bp, unidentified; identical to SEQ ID NO: 9192
  misc_feature 1..144: note = Synthetic
  source 1..144: mol_type = other DNA

SEQ ID NO: 15853 - DNA, 660 bp, unidentified
  misc_feature 1..660: note = Synthetic
  source 1..660: mol_type = other DNA
atggagagagaaaaacaatggatagtgagggtagtatggagggtgtcagagaggcaaataagcagatggagggggatagtgacttacaagatcaggaataaacaattgccttgggaatacagacatcattggcaggtgcaatggcagttttggacctacagccagttcattatccccttatcaaaagatgattacatagaagtgaatatttatcacaacctcaccccagaaagaggatggctctcaagtcatggagtagggttatcctattaccatcaaaagggatataagacagaagtagatccaggaacagcagacagaatgatacacctatattattttaactgttttacagatagagccatccaacaggctatcagaggggagaagtatacgtggtgcacattcaaggaaggacataaaggtcaggtacaatcactgcaacttttggcactagttgcatatacaaatggcatcaggaagagatccaagagaacctttaccaggatggctggaaatctgggatctagacagggagccatgggacgaatggctacaagacatgctcagggatctaaacgaagaagccagaaggcactttggaatgaacatgctaatccgagtatggaattactgtgtagaggagggaaggagacataa

SEQ ID NO: 15854 - DNA, 684 bp, unidentified
  source 1..684: mol_type = other DNA
  misc_feature 1..684: note = Synthetic
atgagtaaagaaattcccacgccttacatgtggagttatcaaccccaaatgggattggcggcaggcgcctcccaggactactccacccgcatgaattggctcagcgccgggccttctatgatttctcgagttaatgatatacgcgcctaccgaaaccaaatacttttggaacagtcagctcttaccaccacgccccgccaacaccttaatcccagaaattggcccgccgccctagtgtaccaggaaagtcccgctcccaccactgtattacttcctcgagacgcccaggccgaagtccaaatgactaatgcaggtgcgcagttagctggcggctccaccctatgtcgtcacaggcctcggcataatataaaacgcctgatgatcagaggccgaggtatccagctcaacgacgagtcggtgagctctccgcttggtctacgaccagacggaatctttcagattgccggctgcgggagatcttccttcacccctcgtcaggctgttctgactttggaaagttcgtcttcgcaaccccgctcgggcggaatcgggaccgttcaatttgtggaggagtttactccctctgtctacttcaaccccttctccggatctcctgggcattacccggacgagttcataccgaacttcgacgcgattagcgagtcagtggacggctacgattga

SEQ ID NO: 15855 - DNA, 10305 bp, unidentified; identical to SEQ ID NO: 10856
  misc_feature 1..10305: note = Synthetic
  source 1..10305: mol_type = other DNA

SEQ ID NO: 15856 - DNA, 3594 bp, unidentified; identical to SEQ ID NO: 10857
  misc_feature 1..3594: note = Synthetic
  source 1..3594: mol_type = other DNA

SEQ ID NO: 15857 - DNA, 423 bp, unidentified
  misc_feature 1..423: note = Synthetic
  source 1..423: mol_type = other DNA
atgaaatctctcgctatgacagctttcttcggagagctaaacacgttagatattatggcattgataatgtctatatttaaacgccatccaaacaataccattttttcagtggataaggatggtcaatttatgattgatttcgaatacgataattataaggcttctcaatatttggatctgaccctcactccgatatctggaaatgaatgcaagactcacgcatcgagtatagccgaacaattggcgtgtgtggatattattaaagaggatattagcgaatatatcaaaactactccccgtcttaaacgatttataaaaaaataccgcaatagatcatatactcgtatcagtcgagatacagaaaagcttaaaatagctctagctaaaggcatagattacgaatatataaaagacgcttgttaa

SEQ ID NO: 15858 - DNA, 21 bp, unidentified
  misc_feature 1..21: note = Synthetic
  source 1..21: mol_type = other DNA
atgaattatctgtttccttaa

SEQ ID NO: 15859 - DNA, 138 bp, unidentified; identical to SEQ ID NO: 9203
  misc_feature 1..138: note = Synthetic
  source 1..138: mol_type = other DNA

SEQ ID NO: 15860 - DNA, 918 bp, unidentified
  source 1..918: mol_type = other DNA
  misc_feature 1..918: note = Synthetic
atgccgcatcctcgggaagagaattcaatcgtcgttgaactcgaaccctcattggctacatttatcaaacaaggatttaataatctcgtaaaatggcccttgttaaacattggaatagttttgtataatacatctaccgcagtcaatgaggaatggctaactgctgtagagcatattcccaccatgaagatattttacaaacatatacataagatacttactagagaaatgggatttttagtctatttgaaaagatcacaatctgaacgagataattatataactttatacgattttgattattatattatagataaggatactaattctgtaactatggtggataaaccgaccgagttaaaggaaactttgttacatgtatttcaagaatatcgtttaaagagttctcaaacaatagagcttatagcgtttagttcaggtacggtaataagcgaagacatagtttcaaaattaacatttttagatgtggaggtatttaatagagaatataataatgttaaaactatcatagatccggattttgtatctagatctccatttatagttatctctcctatgggtaaactaactttcttcgtagaagtatattcgtggtttgattttaaatcgtgtttcaaagatattatagatttcttagaaggtgctctaatagccaatattcataatcacatgattaaggtaggtgattgtgacgaaacagtatcgtcttataatccagagtctggaatgttgtttgttaatgacttaatgaccatgaacatagtcaactttttcggatgtaattctaggttagaatcataccatcggttcgatatgacaaaagtagatgttgaactatttattaaagcattgtctgatgcgtgtaaaaaaattttgtcagcttctaatagattataa

SEQ ID NO: 15861 - DNA, 57 bp, unidentified; identical to SEQ ID NO: 9206
  source 1..57: mol_type = other DNA
  misc_feature 1..57: note = Synthetic

SEQ ID NO: 15862 - DNA, 33 bp, unidentified; identical to SEQ ID NO: 9210
  misc_feature 1..33: note = Synthetic
  source 1..33: mol_type = other DNA

SEQ ID NO: 15863 - DNA, 33 bp, unidentified; identical to SEQ ID NO: 9211
  source 1..33: mol_type = other DNA
  misc_feature 1..33: note = Synthetic

SEQ ID NO: 15864 - DNA, 336 bp, unidentified
  source 1..336: mol_type = other DNA
  misc_feature 1..336: note = Synthetic
atttgggtgcgtgtgtccgagcaagccacggacatgtttgggttgtacttgcgttccgggatcacatgttgtcacatcgagactggtgcgtgtgtaagccgcgctcgcatgcacgcgtgtcgtcgactttgtctggtgtgcacttgcgaagaagacgcgagcacacggctcgtgtcacaacaacaagaagatgctcgagtacggttctcatataaaaaagggcatttgcgtggggagccccatgaactttgtgcgtgccggatgccaatgcccgacctagcaccagaagtctgccaagacgatcgacttttcttgcacatgctcgccgtcggctag

SEQ ID NO: 15865 - DNA, 153 bp, unidentified; identical to SEQ ID NO: 9216
  source 1..153: mol_type = other DNA
  misc_feature 1..153: note = Synthetic

SEQ ID NO: 15866 - DNA, 180 bp, unidentified; identical to SEQ ID NO: 9217
  misc_feature 1..180: note = Synthetic
  source 1..180: mol_type = other DNA

SEQ ID NO: 15867 - DNA, 624 bp, unidentified
  source 1..624: mol_type = other DNA
  misc_feature 1..624: note = Synthetic
acggagagctatcgtgctgagcggaacagagctttggctgtgacgaagatggatgtgtggaagcgtcaacggcttcaagaatgccgtgaattgtgtcctttgcctgtattaatgtcactgtcgaatatgttttcaaaaatcgaaatcgtatacgttaaatatctatttaaaatggacttttctactatgtatagatatattttaccggctcttacgttgagtatgacggttacaaaatccctagttattgaaatgttatttattttaaaaagatgggaagatattgatcaattttttagattgaacatccggaaagtaaacgactgtttcatcgtagctcagttcaaccatattcctataaaaaggaagttaattgtgttgttgtatatgttaaccagtagacaagaaaaacagcttttcctcaatatgatatatgcgtttttagagaagagtcaccttagacttggtgatgatgaagaacagaatgctattcgttttttttcttacgttgatgatttacacctaacgcgggatattttattggagatgatccacaagctcaagaatacggaaatcaatcaaacaatggaacttttattatcgtacaatgaattggctagataa

SEQ ID NO: 15868 - DNA, 453 bp, unidentified
  source 1..453: mol_type = other DNA
  misc_feature 1..453: note = Synthetic
atggacttttctactatgtatagatttattttgccggctctgacgttgagtatgacggttactaaatccgtagttattgaaatgttatttattttaaaaagatgggaagagattaatcaattttttagattgaacatccggaaagtaaacgactgtttcgtcgtagctcagttcaccaatattcctgtaaaaaggaagataattgtgttgttgtacatgttaaccagtagacaagagaaacagcttttccttaatatgatatatgcgtttttagagaagagtcaccttagacttggtgatgatgaagaacagaatgctattcgttttttttcttacgttgatgagttacatctaacgcgggatgttctattggaaattatctacaagctcaagaatacggaaatcaatcaaacaatggaacttttattatcgtacaatgaattggccggataa

SEQ ID NO: 15869 - DNA, 558 bp, unidentified
  misc_feature 1..558: note = Synthetic
  source 1..558: mol_type = other DNA
atctattcacatcttttgcttgtcgctgcaggtatggaggcgcaatttttgtacctctatgccttgatatattttctacaatgcatcaacgcatgtagaattattatgagatgttggctttgttggaagtgcaaatccaagaacccattactttatgatgccaactactttgtttgctggcacacacataactatgactactgtataccatataacagtgtcacagatacaattgtcgttactgaaggtgacggcatttcaacaccaaaactcaaagaagactaccaaattggtggttattctgaggataggcactcaggtgttaaagactatgtcgttgtacatggctatttcaccgaagtttactaccagcttgagtctacacaaattactacagacactggtattgaaaatgctacattcttcatctttaacaagcttgttaaagacccaccgaatgtgcaaatacacacaatcgacggctcttcaggagttgctaatccagcaatggatccaatttatgatgagccgacgacgactactagcgtgcctttgtaa

SEQ ID NO: 15870 - DNA, 30 bp, unidentified
  misc_feature 1..30: note = Synthetic
  source 1..30: mol_type = other DNA
atattttctacaatgcatcaacgcatgtag

SEQ ID NO: 15871 - DNA, 1584 bp, unidentified; identical to SEQ ID NO: 10526
  misc_feature 1..1584: note = Synthetic
  source 1..1584: mol_type = other DNA

SEQ ID NO: 15872 - DNA, 1581 bp, unidentified
  source 1..1581: mol_type = other DNA
  misc_feature 1..1581: note = Synthetic
atggcagggttattaagtgtctttgacacatttagttctaaaaggagtgagagcataaatagaggaggtggtggtgcggttatacctggacaaaagaacaccgtctcagtatttgttctaggctcaagtattgtagacgatagcgataagttagctatagcactcatgtttttaacacatgctcttgatactgacaagcaacattcacaaagaagcggtttcctggtttcattaatggcaatggcatatagtagccctgaattatatctaacaactaatggagttaatgcagatgttaagtatgttatctacacaattgagcatgatcctcagaggacaacccataatgggttcattgttagaacaagagatatggactatgaaaagacaacagagtggctattcagccgtataactaataaatacccattacttcagggacaaaaagacactcatgatccagaatcgctactccagacttatggatatccctcatgtttaggagcattgatagtccaggtctggattgtcttggtcaaagcaattacaagtagtgctggattgaagaaaggattcttcaataggcttgaagccttcaggcaggatggaacagttagaagctcactagtcttcagtggagagacagttgaggggattgggtcagtgatgaggtctcagcagagcctggtgtccttaatggtagaaacactagttaccatgaacacagctagatctgacttgaccactctagagaagaatattcagattgttgggaattacatcagagatgcaggtcttgcttcatttatgaacacgattagatatggtgtggagactaagatggcagcacttacattatctaatcttagacctgatattaataaactaaagagtttaattgacatctacttatctaaaggtgcaagagccccctttatatgtatattacgtgatccagtacacggagaatttgctcctggaaattatccagcattgtggagttatgctatgggggtcgcagtagtccagaacaaagccatgcagcagtatgttacagggagaacatatctggatatggaaatgttccttcttggtcaagcagtagctaaagacgcagagtctaagattagtaatgcattagagagtgaattaggtataactgaaaatgccaaagacaggctcaaacatcatcttgctaacctttctggaggtgatggagcttatcataaacctactggtggaggagcaatagaagttataattgacaatgcagacatagatctcaggacagaggaaatcacagaggaatattcaaccaggctttccaatattggagacaacaaagggagaatagcagatgagcagaggagatgggaaacaaccagatccattagtgatgaccttaatccagataacaacactgacgatgaagtatccgctgcagaaaagaggattgcagaaagactggcaaaaaaggaggggaagaacaccagatcggatatactcaccaccggtggtatgaccgaagatacagacaatgatgatgatataatgagaatgaatgcactaggagggatatga

SEQ ID NO: 15873 - DNA, 2406 bp, unidentified
  misc_feature 1..2406: note = Synthetic
  source 1..2406: mol_type = other DNA
agggagtccatcctcgcgagcatcgtgccgaagatccgcgcgtacatgcgcgacccgaacacggccaccaagtcctacacggacttcatcgccgacaacaagtccatcttcgtggtcaacctgtacaacgtggacgcgatcacggaggacgacatccgcctgctcttcgcgaccatggagcagaaccccgacgctgacgacgccacgctgatctcgatattctcctacatcgggtacaagttcgagaagcaggttcgcgacgacgccaccgcgagcctctcggtgggcgagcgcatcgcggacgacactaggcacagcatgtacgagatgttcttcaacaccttcgacatggtcatccggcagcggcgcgttaacgtgctggtgcacgacgacgccaccggcgaagccgtggtcgtgcagcgcaccagcgatctgcgcaccgccttcgacgacgccgcggagcccgccgtgcgcgagatccccttcaacatgcgcaacatgctgccgtacgtctccaagaacctggaccgcatccgcttctcgaagaagtaccttgagttcgcgtacctgtgtcggcacatcggcatcccggtctcgcggcgcaagctcaacctgcgctacgtgttcatgtacgagctcgacggcgcgcgcatccccattgtgatccgcgacttcctcgacgtgaagaaggtgttcctcgcggccacggacaaggtctacccgaacaactttgcggaggagcagcccgcggtcgcggagtggggccgcgccttcgtggacgccatggccgcggacgcgcgccggctgctgtacaagtacgtgttcctctcgagccggcacctctgcgacctcttcccggcgctgctcaacgcgcgcgacgccaagttccgcccggcctcgcgcgccgcgctggtcgtgcgcgagccgccgggctggggcgagggggtgcgcttcgagtcgccgccctgcgagcaccagatccggctcgcggtcgcgatgcgcgtggacgtggactacttcgccaagatcaacgagttcgtggaggagttcgtgtactttgaggacggcatggcctactgccgcatctgcggcatgaacatcccggacctgaacaccgacgcgtccggcgcgcgcgcgggcgtggtggtgcccgcgaccaacaagtccatcttcctcagcgagccctacagctacttctcgcacagccagcgcttcatcttcaacatcgtgatgtccttcgacaccatcatgaagacgcagacctgggccgtgaagtacaacatcaaccggctcatcctgaacttcctcatcgcgatcaacgcgcgccggcaggagtacgagcgtcgcttcgcggccgagatcaagcgcggcgtattcttcctgcggctctccgcgaacctgctcgacgtgcacgcgtcggccaccgagctgttccagtccgcgaagacgctgaacctcaacttcattgtcgcgctggtcatcgtgctcaacagcagcgcggacttcctcgtctcgttcatggcctcgcggagcgcgaagaagaccaaggacgccagcgtcgaggtcaccgagtccacgctgcggctctctatcgcgacggccgtgcaccacttcctcgtgaagacgcgcgtctgcggcaaggaggacttcgacaccgtgatgctgctcaccgaggtgtacacctccatcatgcccgatgagctggaggcgcactaccgccggctggtcgcggagctgcaccggctgaacaccatcggccgcaccacgcgcagccgcaactacctggtagaatcgtacgcggacgcaggtgaggctcgcgccgtggagtttttcgcttcgcagcgcgtgggggcgcggtccatgcgcacgccgccgcgcgctaggccgacggtgtgcgcggaggtggcgcggcccgcagagacgcccgccgagagccccgacgcgcgcgcggagttccaggacatcatgtcggactcgcgcgtgctcatccgcgtgcacgacaccaacgcctacaacatgaagcgcttcgaggaccacatcaagatcgagatcgagaagaagaagatcatcatctcgctggcgagcctcttcgtcacaaacaccatgaagtactactacgcgaacccggccatgtacgtgttccgctttagcgacccgtaccccttcgacgagacgctgctgagcgcggagcacgtcgcgcacaaggttaacgggtacaacatgttccgtcgcagcttcttcccggacagcgacgtcttcgtgtacttcagcgactctctgagccgcgtggacctggagttcgccttcttcctgttcctggcgggcatcgtgggctcggtcaaggactggatagccgaatccatagccgccataaaagagttgtatatgattaattttaataactaa

SEQ ID NO: 15874 - DNA, 129 bp, unidentified; identical to SEQ ID NO: 9230
  source 1..129: mol_type = other DNA
  misc_feature 1..129: note = Synthetic

SEQ ID NO: 15875 - DNA, 129 bp, unidentified; identical to SEQ ID NO: 9231
  misc_feature 1..129: note = Synthetic
  source 1..129: mol_type = other DNA

SEQ ID NO: 15876 - DNA, 39 bp, unidentified; identical to SEQ ID NO: 9232
  misc_feature 1..39: note = Synthetic
  source 1..39: mol_type = other DNA

SEQ ID NO: 15877 - DNA, 10080 bp, unidentified
  misc_feature 1..10080: note = Synthetic
  source 1..10080: mol_type = other DNA
atgaagaagaaggagtcgggagtagtggagagaggacgcggtacgcgccctccgaccaaccgtggaggaaaagttcctccgaagaaggaaagagatcgaggaggccaagtggtttcacgctctgggaatccaagttccaccgggcttaaccgtggcaatcaggccagaggatctggcggacgtaagggactgctagggaagctggggctgggatgggggtctttcttgcagaaagacatcatccaagccatcatgcacctagttctggtcctccacgccctgttcatgtccattgaccaacgcttcaaggcgctcactcgtcgggtgcgcgctcttgagaaccggcgatctgccaatcccttactgctcgctaccatcatctgcgctgtcgccaccttgtgtggcaccatggtaattgacatgcaagtgtccacggccaaaggcgtgcagatttatgagggaaaaaccaaccggacagattacttgcacctgttcaagcttccaaaagatggatgctggaacggagtgctggtttccaaacattgtcccaaagtcggagatctggctaaggacctggaggctactgattgtggatcaacatggagtgagttcactctgaggtacaaccgatgcgtgggaaagaagcgagtcaagcgggctgctgagcaaccgaagacggacttgcttgcggaaatggagatggtcacgtttaagactattcgtcaaaacaagacagtcttcatcatcgcactgctgtgcgttgctgttgcaaaaaggtggcccacgtgggttgtcatcattctcgcgatcggtacgtggaccactgtcaaaggagaatttgtggaaccactgtacacgctgaaggcggaacagatgaccatgatgcagacgatcgtgcgtccggaagaaggatacgtcattgctaccccaaacggactcgttgaactgcggactagtgctgccatcatcttggggggtcaatggctccgtgagctgttggttgattgtcaagtcaacgccacctattccacggacgtgtgccccggaggctctcagctcaacatggctgagatatcatctagggagcgggtttgcacaacgcaaccatacaaccgaggatggggaactggatgcttcaaatggggtatcggtttcgttggcacttgcgtcgaactacattgcgatgaagggtacaatgcgtcgtctattgcacgatctgccattgtcatgaacatcacggctagtttccattctgttagtgacacccagcaactgatgggtgacattccagtcacctttcggtttgccaagcttggaaacgcggccatgacctgccgcttgggatcagaacagctcctgcttgattactaccacgtaactggaaacaaacgcgaaggactattcctgcggtctcaggtggacaactggcctggcgtcagtctgtcctctggaggacgagctggattggagaaagtcgttgtttggggtgacacgaaagccaatgaaatattggttaaacacgtcatggaaccccagcttgagtgggatgacgctattcccacacatgcgggcttccgggatgttgcattcgtgtgccagataatgctggataagttggtcagcggggcatttcgcgactgccaaggactgaaatcgtctgtgttcgtgcagagcgggtttggatacagcggagttgttgtaacgacactgctgcagccaacaaatgaaagctgctcactcaacatggtttgccatggatgtcaactactggcaacaaaaatggtgtttggagctggaaaatcaactgcccgcgccttcgttggatgtggcaaccacactggatctcttgtgatcggtggggcagcagttccgattgaatgtgtgatgaatcccatctcccaaggatggagactaaccagacatgtcgtggacaagtatcgacgattcggagtaccgggagtggctggagtatggcatgatttcgtgggggggttttccctcgggaacttgttaaccaacactaccctgttggttctactggcctcgttagcattcctggacaagcgcattgtggtattgctgttggtctgtggctacttttactacacacgagccgacgtgggctgtggatttgatcctgacaggaagatcatgtcatgcggcactggtgggtttgtttggaagagcatatcccagtggcccgtaaatgaccactcagtccagctggaagatgatgctgtggttgtgtcactggtgtccgaacaactgaagaccacgaacaaggtctgtctcatgtgtgaggatgtccttcaatgtgcggccgcccgtagcgtggttaagaggatcacgcacgtcaataacgagctggtctacgcaaacgtatctttgtcctacgggaaagtgttcccccgcgtgaagaaatccgtgcacggtgtcaaaatcggcgacataacaatgcaactcgcattagccactctcgatggtaagctagatgacgaggaatttgggcacctcacaagtggcttcttctcgcgtgggaagcagaatgaaactgctgaccacaaggttgtccgagttgtcacaagtggcagtgagtacaagaaagtgtgctcccaggcgttcgctctccagtatggttttgtccggttctcgcgcaaggtttatggatccaatgtggtggttaagccagttgagaagcctagcgaagcttgtccaacttacctggcgggctcgtatgtgaagaatgacattggaggatacactgacggtatgatgtggatgcgcagccgaaaggtgaatggctcatgggagctgttcgaactcgagactacacagagccaccaatgcatttggccacaggagtacacgtttgacctcacaacccataacgacagcgccttgttcatgccagcccactatggggcaccaatgtccaaggccaaccacatccccggatacgggacccaacacgagtttccatggtacaaagctgaaataactctgcgccaaggagcagttcccggaactgaagtggaatcgatggactcatgtgacgagagcggatctgctgtcaaagtggaccctgcgattgccaaaaagtggtgttgcaaaggatgcctggccaacgagcgaaaaccaattcacttcattgtggatggtgactatttctacccgatggagatccgtccaatgactgcacattcaaaactaatcatcgagaatgagggcgttgaaataaacgaaatggatcaaatgttcccgaaaaccgtttctccgatccccggagctgaagcattgctccaggattttcgggacagcctgccagtagatggatcttctcctttattggtgggcgtgcttctacacctgctaacgattcgaactcgacaccgatggggccaacgcacaatcggtacttggctgctgttcgtggtttttggcattcctgttggcggctggctcggttggtcgtggatgggattgtcatattcgctcgcagctgtgcccaatggaagcgcacttcttatacacttctggcttgccttgcagttttcaacgtcacatttgtttttcctcgggtggttattacgcaagcgcgtcgaatcatctatcgagtacgcgttaaccgtgttcgccgccgaatgggtaatcttgaagttacaaatgttgatcaaacaagcatcccacctcgagcacgtcctgttccctctgtacgtgaagttggcactcagtatgaggtcccagtttgcccctgtggacagcatgattgccctgaactacgtggtaacgcacccgttgatggcgtgcctggtgagcctcggtgttgccctggtgatctttgtcacacacgtctgcgtgaactggaggcagtctccaaacttgtggaagagtggacttcgggcttcgaagcgatcagtgctattgggcgtgtactttgtagtgttgtacgcggtttcagtcttactgcaattcatgggtctggagagttctgccgccgctgtgttcctggggggtctgctgatcgggctagtgaccaggctggtgcctccgacgaaatatgtacttgtcccggtgccgggtacgagcgtgccgagcaactgcgaagaatcattcacaagactaccgccaggattagaaggtgtttacggacccagtggggtggaattcctgaactacactgatgtgggattggtgtcttgtgccatcttgctattctcgggctgcctcgggttgactctgatgaatccgtggcttggggtcacgtccatgctcttttgttggtttactggagctcacgtgtggttgccgaggttgatctttggcacaagtaaccgccgctctggagttaacgacgtgctattggcgcctcccatatacgcggatgaagtggacgtggaaaacgactttggtcatttgccggatggaacatacagaatcgtggcccattgtgcgttcttcaagtatcacactggtgctggttatgccaagggtggtgttttcaacacgttgtggcatgtgacgtctggagcttgtgtctactgggagggcagggctgtccgaatgcattcggccgacatctaccgcgatatggcgtcgtacggtgggccatggaatatcactgaatcaaacgaggcttccgtcatcgtccgtgtggtcgaaagtgacaacagcgtgtcttgtgtgcggtgttctactgcccaactgaagattaatggcgaaactgcctcagtagttggaaaagacttcgggcgtggctcatctggatctcccatccactccttggatgggagagtcgttggcctgtacggttacggctttcacattggatgggagtacttctcactcatcacaagtggagaagttgccatggcagccgaagtagctgaggaagcaggttcatcacgaagttttgtggattggcacccaggacgaggaaaaacgcgaaaagtcctagtggttgaagcaaaggaacacatcaaacaggcaaagaggttgttaattctcactccaacgcgggtcgtcaaagacgaggtcatccgagcaatcggagaagcgtgcccaggcgtgatcattgggtcaaacttggccatgtaccggcggaacgcgatcacggtggcttgccatgccactctgacacagtacgtgatggagaagggcattgatagcatcaagttctcaaagatcatcatggacgaatgccattttctcgacccgctgtcgatagcttgccgagggatcatggattatcacaacgcgaaaggtgttaacatcacctacatgagtgcgactccccctggttatcctggaagcaatggatcaaacttcaacattcaggatatagctatgaagttccccagggacgtgaacgctgcatgggttcggaagaattcagaggggaaaacaatcgtcttcgtggctacgcagcatcaggccatgtccctcgcgaaagatctgaaaggcgtggccttaacgcgtgagaccttcgattctgccatcaacaaggctcgcaacccggaaactgaattcgtggtgtccacagacattagtgaaatgggagctaacctcggggtgaaaaccgtcatcgacacgcgcattgccgtgaaacccgtgctgtctgaaggtggagtcatgcttgagaaggtcggtataactgaagcctcagctatccaacgacgtggcagaactgggcgccgcgacgaggggcagtacatataccctctcggaattgatctcgagcacgaacccactaattgggcatgctggactgaagctcaaatggtacttgaccagatgatgtgcggaccaatgcaggaggaggccgaattcttccaacctcttggacacttcctcctggaagagaaagggaggacgcggttcgtggagctcgtgaagaaggaaatacctatctggctcgcgtggcaatgggcaaaagctttcgatcaccgccacacaatcctattcaacggacccgagcggacgaagctcaaaattcgcacggaagcaggagatcatgcgtatgctccacggttccacgatgaccgctttgagaaatgcaacgaattggaaaaacgcacgaaactgtcaatcttcctcaagcagcgaagcgcattcaactttgatgtccttggtgttgctcatggactgtatgttgccctcacctccgtcaacatggaaatgctcagtagcacacttcgtgacaccattgaaaacttgcacgtcatatccagcgtggatgatccctacgtctctgacttcacgatgggacagtccttaaacgcctggacggcggttctcattggagctgttgccagtacggtgctactgttgacgattattggcatgtacaagatcatgtgttggatttttggacgtcgctatgaccaactgactggcgttccaccgacaattgtcacgtatgcccaaggtgggatttcacagctagggtcaatggctcttgcgatcgcccctatgtgtgcagttttagttggaattcccccggtgttcgtcttcattgcggtggttggactgtttgtcataatgagcgttaacgcgaccaacgtccacagagcttacacgggcgacacgatcaccatcatcatcatcatggtctgcgttgttgtcatgggagtagttgcttgggagttggagctgatgccaaacacccgtcgagatctgactcgcctggctcacttcgtgatggaaagaaagttgacaccgtcaggcgaggctgctcgtgaaccggccggccccacgctacctttcagcatcactagcttgcctggagcactatgtgtgagctatgcgatcgctggaataggtggtgtgttcgccaactgttggtcagacggacattttctgcgtggattgtttgccaacgaagcccagtcagcatctgtgataggaggagtgcagatctctgccatcgcatgggagacgatgattcccgttgccttcacagcgttctttgccacaacatttgtgactaagatctatggcatcatcatcggagttatcttcctgattctggcgcatttcgaccgacaatatgccttctctgaccgtgctgtaaaggtgctcgtggctcgaaccagcaagaaagatgttgatgacaacatttctgggcgcgatggaacctcgcatgccaggccaacattcttcatgactcaagttctcgcgtcagcattgtggacagtaaccgccccgtcgagtttrcacatcgtggttttcttcaccatctgctgcttcacgttcctaacgttccgcaggccaaacaaccatcttctagggttgctcgattacaccggattgttactcgtactgatcattgttgttgaccccgtgctgttgttgtttgtcggcgcagctttggttttctggttcattgtgcatcccaaccgtctcgccactcgctcactcgttaagactgacacgtgtgggattgggtaccgatggaaagaaatcttgaacaccctcgacaaaaaatcgttcgaccagtacagatctcgtggtgttaacgaaacggacaaaggagattatgtttcccgcggtggactgaagatggatgagctgctacggaagttccagtgggaaccaaaaggtgttgctgtcgaccttggatgtggaagaggaggttggagccaacgtttggtgatggattcacgggttagcgccgtccagggattcactcttggaggtaacaaccgcgaaaacccccaaccrttycgaacgaagggacacaacctggcaacgttgaaagctggagttgatgtttatgctgaacctcccaaggattgcaacacgattgtctgcgacattggagaaagtgaccctcgtggtgatgttgaacgaactcgtacgctgaaggtcctgggcttgcttgagaggtggctggaacacaacccgaatgctgcttttgcgtgtaaggtgctatctccttaccacatcgaggtgctgcggaagttagagacgttacagcataagtacggtggcagagttgtccggctgtcgtatagccggaactcaacagccgaaatgtactacatctctggtgccagagctaacattgtcggctctgtgtttcaagttctcggggctctccttggtcgcttccgcaggaacgacccagtgattgttgactgcccgccgaaactggaacttggaacccgcagcgaccccaggtccaaagtgaagcaacaacagcctcagctcgttgaacggcgcgtgcagcgcttgaagaacgagaactcgcatacctggttcgttgaccgtgaacatccgtatcaatccttcaactaccacgggtcgttcgcaactgatgacatctctcctggtggccagacggtgaacccaatgatgcgtcgaatcatgtggccttgggacttcctcacacgtgtgacaacgtttatgatgacggatgtatccacgtactcgcaacagaagatcctaagagagaaagtcgacacactcactatggaaccggacacgcgcacgaaagatctgaatcgcctcatcatgaaacacttctcacgttcgtttaagagacgtggattgcgacctcggatcctgaccccctctgattacatcaataacgttaagagcggggcagccgtggggggatggagctccgaaatgccgtggaatggagtcaatgaagcgttgaacgaccctgcgttctggagtttggttgatcgagagcgagcgttgcacctgaagggagattgtgagctctgtgtctacaacaccatgggcaagaaggaaaagaaaccgtcttcgttcggtgaagctcgcggatcacgcatcatctggtacatgtggttgggaagtaggttcctcgagtatgaagcgctcgggttcttaaacgaagaccattgggtcgcgcgggagaattttccgtgcggtgtcggaggtgtgggagtgaattactttgggtattacctaaaggagatcgcccagaaaggacaatggctgatagccgacgacgtggcaggctgggacactaagatcacggaagctgaccttgaagacgagttgtggctgttgctcgacatggtgcaggatccctaccatgctcaactcatatccagcgtgtttaagcattgctacatgaacatggttgccctgttccctcgtaatcatcccaagtacagaagcggcacggtgttcgacgtgctatcccgcacggatcaacgtggttccggacaggtcacaacctacgccctcaacacagtgacgaatggaaaaaatcaggtgggccgaatgctggaagctgaaggattgctggaagaacctctacctgtgatcgacacgtggctggacaacaacctcgaacacgttctcggttgcatggtcgttgctggagatgatgttgttgttgcgacaaacaacgatcgcttccacaccagcttgacgtatatcacmatcacgtcaaaaacacggaagaacctcaaaccaactgagccgtctcccaggtacacaagctgggagcaagtcgagttttgctcccaccacttccatgctctggtactgagggatgggcgggagatcattgctccatgtcgtgatcagcatgaaatcatcgggagagctcgaatccagaagggaggagttgttaacatgtccgccgccgggtgcctagccaaggctcatgcccaaatgtgggggttgtattacttccaccgcagggacttgcgattgggtttcgcggctatmgtrtcagccgttccttcaaactggattccgacaggtcgcgtctcctggtccgtgcaccagcacgctgagtggatgaccacccaagacatgttggaggtgtggaacaccgtgtggatcgttaacaatccatggatgatgaccaaggacctcgtgaagtcttggacagacatcccgtatcttcccaagtcaaaagacatcgcttgcggtagcctcattggcgagcgcgatagagcctcatggtctaagaatatcgtggctacggtggaaaccgctcggaggattattgaacaggagaacggcagccaaaagtttccggatggattgcagatcctagggagatacaagacccaccgagatcccgtgtttgggtaa

SEQ ID NO: 15878 - DNA, 54 bp, unidentified; identical to SEQ ID NO: 9235
  misc_feature 1..54: note = Synthetic
  source 1..54: mol_type = other DNA

SEQ ID NO: 15879 - DNA, 1725 bp, unidentified
  source 1..1725: mol_type = other DNA
  misc_feature 1..1725: note = Synthetic
atggaatattgggggcacacaaacaatccagacaagattaaccggaaagtcggtgtagatcaggtgagagacagaagcaaaacactaaaaatcataacattcatcatatccatgatgacatcaatcatgagtacagtcgcacttatactaatcttaatcatgtttatccaaaataacaataacaatagaataatacttcaagaattaagagatgagaccgacgctattgaggccagaatacaaaaagcctcaaatgatataggggtttctatacaatcaggaataaatacaagactcctaacaattcaaaaccatgtacagaattatattccattagcattaacacaacaagtctccagtcttagagaatctataaatgatgtgattaccaaaagggaagaaacacaatcaaaaatgccaatacagagaatgactcatgatgatggaatagaacctctaattccagacaacttctggaagtgcccttctgggatccctactatatcagccagtccaaagatcaggctaattccagggcctggtttattagcaacatcaacaactatcaatggttgtattagactcccatcgttagtcataaataacttgatatatgcttatacatctaacttaataactcaaggatgtcaagatatagggaaatcctaccaagtactccagatagggataataactataaactcagatttggtaccagatttgaacccgaggattactcatacatttgatattgatgataaccgtaaatcctgttctttagcattacgaaatgctgacgtttaccaattatgttcaactccaaaagtggatgaaagatcagattactcatcaataggtattgaagacatagtattagatattgttacaagcgagggtacagtctcaaccacaagattcacaaataataatataacatttgacaaaccttatgcagcactttatccatctgtagggccagggatatactatgacaataaaattatcttccttggatatggtgggctagaacatgaagaaaatggcgatgtcatttgcaatatcactggatgtccaggcaaaacccagcatgattgtaatcaagcttcttatagtccgtggttttctaacagaagaatggtaaatgctatcattcttgtcaacaaaggactaaacaaggtaccaagtttgcaggtatggactattcccatgagacaaaattattggggatcagaggggagactactcctattgggaaataaaatttatatatatacaagatctacaagttggcacagcaaattacagctcggaacactagatatctctaattataatgatatacgaattagatggacacatcatgatgtattatcaagaccaggcagtgaagagtgtccatggggcaacacctgtccacggggatgtataacaggagtctacaatgatgcatacccattgaatccatcagggagtgtagtatcatctgttattcttgattctcggacatccagggagaaccccattattacctattctacagacacatctagagtaaatgagctagcgattaggaacaatacattatcagcagcatatactacaacaaattgtgtaacacattatggtaaaggctactgtttccacatcatagaaataaatcataagagtttaaacaccctccaacctatgttgtttaagacagagattcctaaaagttgcaactaa

SEQ ID NO: 15880 - DNA, 66 bp, unidentified; identical to SEQ ID NO: 14732
  misc_feature 1..66: note = Synthetic
  source 1..66: mol_type = other DNA

SEQ ID NO: 15881 - DNA, 135 bp, unidentified
  misc_feature 1..135: note = Synthetic
  source 1..135: mol_type = other DNA
aagttcttagagttttcgaatagagtatacgaagctctctattacgttcactcgttgctttattctagtatgacttctgattcgaaaagtatcgaaaacaaacatcagagaagactagttaaactactgttatga

SEQ ID NO: 15882 - DNA, 21 bp, unidentified
  source 1..21: mol_type = other DNA
  misc_feature 1..21: note = Synthetic
atgaaaatcaatggcggataa

SEQ ID NO: 15883 - DNA, 198 bp, unidentified
  source 1..198: mol_type = other DNA
  misc_feature 1..198: note = Synthetic
atggagggatctaaacgcaaacacgacagtcggcgaccacaacaagaacaggagcagcatcgtccacgtacaccgccatcatatgaagaaattgcaaaatatggacactcatttaacgtgaaaagatttacgaatgaagaaatgtgtcttaagaatgattatccacgaattatatcatataatcctccgccaaaatag

SEQ ID NO: 15884 - DNA, 21 bp, unidentified
  source 1..21: mol_type = other DNA
  misc_feature 1..21: note = Synthetic
atggacactcatttaacgtga

SEQ ID NO: 15885 - DNA, 30 bp, unidentified; identical to SEQ ID NO: 1447
  misc_feature 1..30: note = Synthetic
  source 1..30: mol_type = other DNA

SEQ ID NO: 15886 - DNA, 72 bp, unidentified; identical to SEQ ID NO: 983
  misc_feature 1..72: note = Synthetic
  source 1..72: mol_type = other DNA

SEQ ID NO: 15887 - DNA, 72 bp, unidentified; identical to SEQ ID NO: 983
  source 1..72: mol_type = other DNA
  misc_feature 1..72: note = Synthetic

SEQ ID NO: 15888 - DNA, 72 bp, unidentified; identical to SEQ ID NO: 983
  misc_feature 1..72: note = Synthetic
  source 1..72: mol_type = other DNA

SEQ ID NO: 15889 - DNA, 729 bp, unidentified
  source 1..729: mol_type = other DNA
  misc_feature 1..729: note = Synthetic
atggcttctagcattatggcaggcatagcaggcgatgtgctaggctcagttgtgggtggattagttggagccggtgctaacgccataaaccaatctgttgaatttgggtacaaccaagcactgcaatctaatgctttccaacatgataaagacatgcttgccttacaggtggccgcgacccgccagctacagtcggatttgatcaacttgcgcgagcaggttcttcgcaagggtggtttctccgacactgatgcggcgcgtggagccattggtgcccccatgtcacgccttgtggattggaacggcacaaggttgtccgccccgggttccatgcacacaacatcatactcgggccggtttgttggcacaaccagacaacaaccccacttcacccctcctccgcaaactaatcatgttagaattgatgatgaagtttcttctgtctcttccttgcccacagcggtgacctcagtccctagttctaggacagctgattgggttcatagtcaaagacagctatcctcctggggttctagtgcatcccaacattcacagctggaaccctttcatccaaacgctctgagagtggcttgggggtctactccgagttcctcctccagagcgtccactgtggatggttcagtcattgattcatggacccccgcttttaatttgaagcatcagcctttctttgctcgctttcacccgaggggtgcttctaatgtttag

SEQ ID NO: 15890 - DNA, 729 bp, unidentified; identical to SEQ ID NO: 15889
  source 1..729: mol_type = other DNA
  misc_feature 1..729: note = Synthetic

SEQ ID NO: 15891 - DNA, 414 bp, unidentified
  source 1..414: mol_type = other DNA
  misc_feature 1..414: note = Synthetic
gtgaggtttccggccttgtctagggtaagaccgctgcccattttaagcgcaagcatgccgtgggaggtgtccaaaggttcggagacgcgtagagagagaactccagggggactttcttggaaaccattgggtgaaacaaatggaggggtaagaaagggcacagttggaggcccggtttctgtgtcatatggatacacggggttgaaggtgtcttcagacggtctggcgcgtttcatctgcaacaatatgaagatagtgggtgcggagggacaagaacatgaggaatttgacatcccatttaaactttggagaaagtttgcagctaaaaggcggctgagataccagagttgggaggaaggaaaggaggtgatgctgaataagctggacaaagatttgctgactgattttaagtaa

SEQ ID NO: 15892 - DNA, 36 bp, unidentified; identical to SEQ ID NO: 9249
  misc_feature 1..36: note = Synthetic
  source 1..36: mol_type = other DNA

SEQ ID NO: 15893 - DNA, 471 bp, unidentified
  misc_feature 1..471: note = Synthetic
  source 1..471: mol_type = other DNA
atgatgggatatgaggaaaaagtgtcagctactggaaagactcgtttaaagatactggcatgtctgatcgttttaatactagctgcggcaataactatgttaacgctggaaattatatcgaaccaaaaacgtaccactactgatctcgaagctgtgactgtggcgctgaagcatgtaagcacatctcttgccaactgcactgaatccactacttctgtacataccgccaacccacgaaaaaacaaagaatcgaggaaaaaaattgaagggaaatctccaagttgggttcaggctttaactacagcatctggaattatcctactgttttgtataatgatgatattcattacatgttcctggaccacagaaaaagatacagagaagagtgaagtgcaatcttatgcttcttcagtagagactttagactctttaaatgaggctattataccgaaaactgaaatgaatgtgtaa

SEQ ID NO: 15894 - DNA, 471 bp, unidentified
  misc_feature 1..471: note = Synthetic
  source 1..471: mol_type = other DNA
ctgaccataatggggaaaaaatcatctactggaactggaaaaactaatctaaagatactggcatgtctactattgatatttctaatggcaacaatatttttgctaatactggaaattatatcgggccaaagatattccaatgatgattccgaaggtgtgactgcggcgctgaagcatgtaagcacacctactaccaactgcactgaaaccactactcctgattccgtaacgagccaagccatggaaaacaaagaatcaatgaaaaaaaatgaaggggaacctccagtttggattcaggctttaactacaacattatcaattatcctattggtttgcataataatggcatgcattatatgttcccggaccacggaagaagagaagagcgaaatgcaatcttctgcttcttcagtagagactttacagtctttaaatgaggctatttttccgaaaggtgaaatgaatgtgtaa

SEQ ID NO: 15895 - DNA, 36 bp, unidentified; identical to SEQ ID NO: 9255
  misc_feature 1..36: note = Synthetic
  source 1..36: mol_type = other DNA

SEQ ID NO: 15896 - DNA, 195 bp, unidentified; identical to SEQ ID NO: 13126
  source 1..195: mol_type = other DNA
  misc_feature 1..195: note = Synthetic

SEQ ID NO: 15897 - DNA, 111 bp, unidentified; identical to SEQ ID NO: 9261
  misc_feature 1..111: note = Synthetic
  source 1..111: mol_type = other DNA

SEQ ID NO: 15898 - DNA, 111 bp, unidentified; identical to SEQ ID NO: 9261
  misc_feature 1..111: note = Synthetic
  source 1..111: mol_type = other DNA

SEQ ID NO: 15899 - DNA, 111 bp, unidentified; identical to SEQ ID NO: 9261
  source 1..111: mol_type = other DNA
  misc_feature 1..111: note = Synthetic

SEQ ID NO: 15900 - DNA, 297 bp, unidentified
  misc_feature 1..297: note = Synthetic
  source 1..297: mol_type = other DNA
acgaggggagttatggacaccaagggcatcctgctcgtcgctgtgctgactgccttgctttgtttgcaatctggggacacgctgggagcgtcctggcatagaccggacaagtgctgtctcggttaccagaaaagaccattaccacaggtgcttctgtccagctggtaccccacctcccaactgtgcagcaagccgggtgtgatatttttgacaaagcgtggtcgccaggtgtgtgccgacaaatcgaaagactgggtgaagaagctgatgcagcaattaccagtcactgctcgctga

SEQ ID NO: 15901 - DNA, 297 bp, unidentified; identical to SEQ ID NO: 15900
  source 1..297: mol_type = other DNA
  misc_feature 1..297: note = Synthetic

SEQ ID NO: 15902 - DNA, 15 bp, unidentified
  source 1..15: mol_type = other DNA
  misc_feature 1..15: note = Synthetic
atgtataatcattaa

SEQ ID NO: 15903 - DNA, 33 bp, unidentified; identical to SEQ ID NO: 9265
  source 1..33: mol_type = other DNA
  misc_feature 1..33: note = Synthetic

SEQ ID NO: 15904 - DNA, 33 bp, unidentified; identical to SEQ ID NO: 9265
  misc_feature 1..33: note = Synthetic
  source 1..33: mol_type = other DNA

SEQ ID NO: 15905 - DNA, 552 bp, unidentified
  misc_feature 1..552: note = Synthetic
  source 1..552: mol_type = other DNA
atgtttgacgacttttcagcaggagcaggagtttccgaaagagatctatttactagagaggaagaagaatcctttttaccaaaagaagatggggactttaaaatgtctttatctaactttaaaggtgcttttccggatatattggttagaaacgatgtaaaatcactaataggattaattttatttgtgttagctataacaacaactcctgtaattgctgtaattatgatagcagttgctgcagcgttaattccgtttccttcgttggttatagcatattgtttatctatgcaaattattaatcctggagcaaataaaacaactgctatgtctattatctgtgtggctatggctattattacaatagtagtaaactctttatctagaaccgcgtacactatttcatatattattttagcagttttattttgcatatatgcatttaaccttacaaaatttaaacttggatcgtcaactatttccaagtgttctagagaatttagaggaggtgataaatacggtggtgaaaatcctagtttttatgaagattaa

SEQ ID NO: 15906 - DNA, 1011 bp, unidentified
  misc_feature 1..1011: note = Synthetic
  source 1..1011: mol_type = other DNA
atggcgagcccggaagagaggctcctagacgagctcaataacgtaattgtgtcatttctgtgtgactctgggtctctggaagtggagagatgctccggggcgcatgtgttctccaggggcagctcccaacccctctgcaccgtgaagctgcgccacggacagatttaccacctggagtttgtctacaagttcctggcctttaagctgaagaactgcaactacccctcctcgcccgtgtttgtgatatccaacaacggcctggccaccaccctgaggtgctttttgcacgagccgtcgggtctcagatcgggccagagcggcccttgcctgggtctctcaacggatgttgacctaccaaagaactccatcattatgctgggccaggatgacttcattaagttcaaaagccccctggtcttccctgctgagcttgatctcctgaaatctatggtggtctgccgggcctacatcacggaacaccggacgacgatgcagtttctggtgtttcaggccgccaacgcccagaaggcctcgcgggtcatggatatgattagtgatatgtctcagcaactgtctcggtctggtcaagtcgaggatacgggcgccagagtcacaggtggaggaggtcccaggcctggcgtcacgcactcggggtgtcttggggactcacacgttagggggcgcggtggttgggacttggataacttttcagaagctgagaccgaagacgaggcgagttacgctccttggagggacaaagactcgtggtcggaatccgaggcggcgccgtggaagaaggaactcgtgaggcaccccatccgcaggcaccggacacgcgagactcgccgtatgcgcgggagccattcacgggtggaacacgtgccccccgagacccgggagacggtggtggggggagcatggcgttattcttggcgcgccacaccttatctggcacgggtgctggctgtcacggccgtggccctgctcctgatgtttctgaggtggacctga

SEQ ID NO: 15907 - DNA, 1011 bp, unidentified
  misc_feature 1..1011: note = Synthetic
  source 1..1011: mol_type = other DNA
atggcgagcccggaagagaggctcctagacgagctcaataacgtaattgtgtcatttctgtgtgactctgggtctctggaagtggagagatgctccggggcgcatgtgttctccaggggcagctcccaacccctctgcaccgtgaagctgcgccacggacagatttaccacctggagtttgtctacaagttcctggcctttaagctgaagaactgcaactacccctcctcgcctgtgtttgtgatatccaacaacggcctggccaccaccctgaggtgctttttgcacgagccgtcgggtctcagatcgggccagagcggcccttgcctgggtctctcaacggatgttgacctaccaaagaactccatcattatgctgggccaggatgacttcattaagttcaaaagccccctggtcttccctgctgagcttgatctcctgaaatctatggtggtctgccgggcctacatcacggaacaccggacgacgatgcagtttctggtgtttcaggccgccaacgcccagaaggcctcgcgggtcatggatatgattagtgatatgtctcagcaactgtctcggtctggtcaagtcgaggatacgggcgccagagtcacaggtggaggaggtcccaggcctagcgtcacgcactcggggtgtcttggggactcacacgttagggggcgcggtggttgggacttggataacttttcagaagctgagaccgaagacgaggcgagttacgctccttggagggacaaagactcgtggtcggaatccgaggcggcgccgtggaagaaggaactcgtgaggcaccccatccgcaggcaccggacacgcgagactcgccgtatgcgcgggagccattcacgggtggaacacgtgccccctgagacccgggagacggtggtggggggagcatggcgttattcttggcgcgccacaccttatctggcacgggtgctggcggtcacggccgtggccctgctcctgatgtttctgaggtggacctga

SEQ ID NO: 15908 - DNA, 1011 bp, unidentified
  misc_feature 1..1011: note = Synthetic
  source 1..1011: mol_type = other DNA
atggcgagcccggaagagaggctcctagacgagctcaataacttaattgtgtcatttctgtgtgactctgggtctctggaagtggagagatgctccggggcgcatgtgttctccaggggcagctcccaacccctctgcaccgtgaagctgcgccacggacagatttaccacctggagtttgtctacaagttcctggcctttaagctgaagaactgcaactacccttcctcgcccgtgtttgtgatatccaacaacggcctggccaccaccctgaggtgctttttgcacgagccgtcgggtctcagatcgggccagagcggcccttgcctgggtctctcaacggatgttgacctaccaaagaactccatcattatgctgggccaggatgacttcattaagttcaaaagccccctggtcttccctgctgagcttgatctcctgaaatctatggtggtctgccgggcctacatcacggaacaccggacgacgatgcagtttctggtgtttcaggccgccaacgcccagaaggcctcgcgggtcatggatatgattagtgatatgtctcagcaactgtctcggtctggtcaagtcgaggatacgggcgccagagtcacaggtggaggaggtcccaggcctggcgtcacgcactcggggtgtcttggggactcacacgttagggggcgcggtggttgggacttggataacttttcagaagctgagaccgaagacgaggcgagttacgctccttggagggacaaagactcgtggtcggaatccgaggcggcgccgtggaagaaggaactcgtgaggcaccccatccgcaggcaccggacacgcgagactcgccgtatgcgcgggagccattcacgggtggaacacgtgccccccgagacccgggagacggtggtggggggagcatggcgttattcttggcgcgccacaccttatctggcacgggtgctggctgtcacggccgtggccctgctcctgatgtttctgaggtggacctga

SEQ ID NO: 15909 - DNA, 33 bp, unidentified; identical to SEQ ID NO: 1
  misc_feature 1..33: note = Synthetic
  source 1..33: mol_type = other DNA

SEQ ID NO: 15910 - DNA, 36 bp, unidentified; identical to SEQ ID NO: 1147
  source 1..36: mol_type = other DNA
  misc_feature 1..36: note = Synthetic

SEQ ID NO: 15911 - DNA, 57 bp, unidentified; identical to SEQ ID NO: 9294
  misc_feature 1..57: note = Synthetic
  source 1..57: mol_type = other DNA

SEQ ID NO: 15912 - DNA, 84 bp, unidentified
  source 1..84: mol_type = other DNA
  misc_feature 1..84: note = Synthetic
atcttcttcatcatcctcgtattcggtgagatcatcggattcatagtcgataatatcgtccgtgtctgccatttaatcttataa

SEQ ID NO: 15913 - DNA, 99 bp, unidentified; identical to SEQ ID NO: 9296
  misc_feature 1..99: note = Synthetic
  source 1..99: mol_type = other DNA

SEQ ID NO: 15914 - DNA, 318 bp, unidentified
  source 1..318: mol_type = other DNA
  misc_feature 1..318: note = Synthetic
atgttcggatctataggcttgattttcgcattgactttacacagacataaacatcccctgaatctgtacctactttgtggatttacactgttagaatctctaacgctggcctctgttgttactttctatgatgcgcgtatcgttatacaagctttcatgttgactactgcagtgtttcttgctctgactacatgtactctacaatcaaagagagatttcagtaaacttgtaacaggattgtttgctgctttctggattttaattttgtcaggagtcttgaggataaagtttaaaatagaattaataaagaacatatag

SEQ ID NO: 15915 - DNA, 24 bp, unidentified
  misc_feature 1..24: note = Synthetic
  source 1..24: mol_type = other DNA
atgatttcagttattttaatataa

SEQ ID NO: 15916 - DNA, 897 bp, unidentified
  source 1..897: mol_type = other DNA
  misc_feature 1..897: note = Synthetic
ttggcacaggtgtacactatgagtcccttgatgcttcgattattgccgcttctatgtattatcataagcgcacattttgtaccccgcccggagacgagtccttctttagtatacgaaatagggtcaactgttactttccattgtcgcctcaacacaacgacaaacatccaaagcgtctcgtggtacaataaaagccgacttatatcgaatcatgagatacaaaacatggacaacttatcgttcactgacgatggctacgtttttatacacgaactaaataagatcaacaatcttgacgtggacagtaaattgtatttccacataaaacacgatagaactacatctctgttgaaaattaaagccagatcagcatatgacgcgacatgtttaacctgtacattcacagtggataacgagaaaacatctgcgactagttgcttaaaactcattatgaaacccatcgtcgttttgtattttcgttacctaaacaattttttagacgttacgtgtaccgtgacgtcttatccaaaaccaaatgtggttattaaatttcttggagaagtatataagagagacataccaatggttagacagaatgaaaacggatcgtcaaccgttagtgtgagctttactttcaaaagacgaaccaagctggaatttgtcggaaaaaccatctcatgtctagcgtcgagctggtttaccaaccaaaaggctagcgctctcgtaacttccggcgaacacactgtgcaaaatcacgacgaatacagtaaagaagcggtaaaaggctcaaattctgacgaaaccgtatttacctggatcgtaccattaattctgatattgataatatcagttatggtgctactgatttcgatgtgcatcgttgcatttaaaagttaa

SEQ ID NO: 15917 - DNA, 339 bp, unidentified
  source 1..339: mol_type = other DNA
  misc_feature 1..339: note = Synthetic
atgatacacctatattattttaactgttttacagatagagccatccaacaggctatcagaggggagaagtatacgtggtgcacattcaaggaaggacataaaggtcaggtacaatcactgcaacttttggcactagttgcatatacaaatggcatcaggaagagatccaagagaacctttaccaggatggctggaaatctgggatctagacagggagccatgggacgaatggctacaagacatgctcagggatctaaacgaagaagccagaaggcactttggaatgaacatgctaatccgagtatggaattactgtgtagaggagggaaggagacataa

SEQ ID NO: 15918 - DNA, 18 bp, unidentified
  source 1..18: mol_type = other DNA
  misc_feature 1..18: note = Synthetic
acggatatacaaaactga

SEQ ID NO: 15919 - DNA, 267 bp, unidentified
  misc_feature 1..267: note = Synthetic
  source 1..267: mol_type = other DNA
atggaagttatcgctgatcgtctagacgatatagtggaacaaaatatagcggatgaaaaatttgtagattttgttatacacggtctactagaacatcaatgtccctccatacttcggccattacttaggttgttgattgatatactattatttgttatagtaatttatatttttacggtacgtctggtacgtagaaattatcaaatgttgttggtgttggtggcgctagtcatcgcgttaactattttttattactttatactataa

SEQ ID NO: 15920 - DNA, 120 bp, unidentified
  misc_feature 1..120: note = Synthetic
  source 1..120: mol_type = other DNA
atttctacaactcagatgctgccaggtacaaagagctcagccatatttccggtatatgaccttcgtaagctgctcggtgcgcttgtcatttcggaaggtagtgtcaagttcgacatataa

SEQ ID NO: 15921 - DNA, 918 bp, unidentified
  source 1..918: mol_type = other DNA
  misc_feature 1..918: note = Synthetic
attaccggtaccatgggagacttgtcatgttggacaaaggtgccgggttttacgttaaccggcgaacttcagtacttaaaacaagtggatgatattttaaggtatggagttcggaaacgcgatcgaacaggaatcggaacgttatctttatttggaatgcaagctcgatacaatttgcgaaatgaatttcctcttttaactacaaagcgtgttttttggagggccgtcgtggaagagttgttatggtttatccgcgggtcaaccgattccaaagaactcgccgctaaagatatacacatatgggatatatacggatcgagcaaatttctaaataggaatggcttccataaaagacacacgggggaccttggccccatttacggcttccagtggagacattttggagcggaatataaagactgtcaatcaaactatttacagcaaggaatcgatcagctgcaaactgttatagatacaattaaaacaaacccagaaagccgacgaatgattatatcgtcttggaatccaaaggatatccccttaatggtactacctccatgtcacacgttatgtcagttttacgttgcaaacggtgaattatcctgccaagtataccagagatcgggggatatgggccttggggtaccgttcaacattgctggatatgcacttcttacctacatagtagcgcatgttacaggacttaaaaccggagatttaattcatacaatgggggatgcacatatttacttgaatcatatagatgctttaaaagtgcagctagctcgatccccaaaaccttttccttgccttaaaattattcgaaatgtaacagatataaacgactttaaatgggacgattttcagcttgatggatataatccacacccccccctaaaaatggaaatggctctttaa

SEQ ID NO: 15922 - DNA, 54 bp, unidentified; identical to SEQ ID NO: 9318
  misc_feature 1..54: note = Synthetic
  source 1..54: mol_type = other DNA

SEQ ID NO: 15923 - DNA, 18 bp, unidentified
  source 1..18: mol_type = other DNA
  misc_feature 1..18: note = Synthetic
acggatatacaaaactga

SEQ ID NO: 15924 - DNA, 927 bp, unidentified
  misc_feature 1..927: note = Synthetic
  source 1..927: mol_type = other DNA
attcgtggtgtcaaaatgagcaaagatttggtgcatcctagtcttatcagggcagggatagtagaactggaaatggcagaagagactactgatctgattaacaggaccatagagagcaaccaagctcaccttcagggggagccgctttatgttgattcattgccggaagatatgagcagattgagaatagaggacaaatctcgtaggactaaaacagaagaagaagaaagagatgaaggtagttctgaggaggataactatttgtctgagggacaagatccattaatcccctttcagaatttccttgatgaaattggggccagagcggtcaagagattgaagactggcgagggattcttcagggtgtggtctgctctgtcagatgacataaaggggtatgtatctaccaatataatgacatctggggagagagatactaagagcatacaaattcagacagaaccaaccgcttcagttagctctggaaacgagagtcggcatgattctgagagcatgcatgatccaaatgacaagaaagatcacacacccgatcacgatgtggtcccggacattgagtcttctactgacaaaggagagattcgagatatagaaggagaagttgcccatcaggtagcagaaagcttttcaaagaaatacaagttcccttctagatcctcgggaatattcttgtggaactttgagcagcttaaaatgaatctagatgatattgtgaaagcagccatgaatgtaccaggggttgaaaggatcgccgaaaagggagggaagcttcccctgagatgtattttggggtttgtggcattggactcttcaaagagatttagacttcttgcagacaatgacaaggtggcaagactcatccaagaagatatcaacagttacatggcccggctcgaggaggcagagtaa

SEQ ID NO: 15925 - DNA, 384 bp, unidentified
  misc_feature 1..384: note = Synthetic
  source 1..384: mol_type = other DNA
atgaccatgcagactctgctaatactgctatcccttttatcccccgcccttgccacttttgattactctaaatgcaaatttgttgagctatggaatttcttaaactgctataatgctacaatggatatgccttcctattacttggtaattgtgggaatagtgatggtctgctcctgcactttctttgctattatgatctacccctgttttgatctcggctggaactctgttggggcatttacatacacactacaaaacagttcaccagccttcacaccgcctccccgcagaaatcagttccccctgattcagtacttagaagagccccctccccggcccccttccactgttagttactttcacataaccgccggcgatgactga

SEQ ID NO: 15926 - DNA, 156 bp, unidentified
  misc_feature 1..156: note = Synthetic
  source 1..156: mol_type = other DNA
acgcagcgcctttggtcggcaaccagcgtcttgacagtgaggagaaagcaaatttctgctcgacacatcaaaatgaagtgtacgccaggttccggcttcagatgcgcgtgggtgtacgacacagtccgctctacactcccagcaacatgtgcatga

SEQ ID NO: 15927 - DNA, 18 bp, unidentified
  misc_feature 1..18: note = Synthetic
  source 1..18: mol_type = other DNA
acggatatacaaaactga

SEQ ID NO: 15928 - DNA, 51 bp, unidentified; identical to SEQ ID NO: 9330
  source 1..51: mol_type = other DNA
  misc_feature 1..51: note = Synthetic

SEQ ID NO: 15929 - DNA, 75 bp, unidentified; identical to SEQ ID NO: 9331
  misc_feature 1..75: note = Synthetic
  source 1..75: mol_type = other DNA

SEQ ID NO: 15930 - DNA, 1266 bp, unidentified
  misc_feature 1..1266: note = Synthetic
  source 1..1266: mol_type = other DNA
atggctcgaaatctgcgcgaggccatggccgagagcctgggccgcacttcgcgcagcttggccgcagagcagtccgttctcttctcgcgcctggaagtgcgcatcgaggtcgaggagcagattgaggcgcgcgaggacattgacctcaaggcgcagggcgcggcgctacaacgccgactacgcgcggcgttacgatccacgcccgccgcgtacgctcgacagcgcgtaggtacgagctcgcacaccgtgcctgcagccgtggctgtgcagacatgcccgacgccggcgatcgcggccgcgcagacgtgcccgatgccggcgacagcacccgcggcagcgcaggcctgtccgatgccgggacccgtgtcttcgttaggaacaaccacgtgtccgatgccggagtccacgtccgcgtgctcagcactggccacgacgttgccgacgcgccccccggttccgccgcggccttcaatactctccatccgagtgcccgaacagcttccgcgcaggaatcccttagatccgacgctcaacatgctcctggcgaagccgccgccgccggtggctgccgcgcgcctgcgctttgccctgtctccggacggagagccggcgccttctcccgcgcgcgacacagacacgtgccctgcgcccgcaacggcgcccgcgtgccccgcgcccgcaacgtcgcccgcgtgccccgcgcccgcaacggcgcccgcgtgccccgctcccgcaacggcgcccgcgtgccccgcacccgcaacggcgcccgcgtgccccgcgcccgcaacggcgcccgcgtgccccgcgcccgcgtgccccactcccgcgtgccccgcgcccgcaacggcgcccgcgtgcgcggtgcccagcgtgcgccaggagctgcagtctttgcaacaggacacgcttgcgttgcagacgcaggccaacgggctccttagcgagatccaagatgccaggcagtccacggttggcgccatcgacgacctcaagtctctgttcgagaacctgcacgcgacgctgcgacgcagccgcgagcgcttgcgacctgaagacgatgacgatgacgacgacgaggacgacgacggcgccggcggcgcgcgcgggtgctacaccgtgctggagggcccggagctgcgcaagttatgccgcgggctgtccgaggcctgccgcgccgtggagagtctgcgcgagctgctggcgctcgagccgcgatcgcgcgcaaattcgccccccgcggagtgcgaaaaactccgaatataa

SEQ ID NO: 15931 - DNA, 498 bp, unidentified
  source 1..498: mol_type = other DNA
  misc_feature 1..498: note = Synthetic
acgaaaacatttttcattaagtttatcatgaatgtgtataataaagccgattcgttttctttagagtctgattctatcaaagatgttatacacgattatatttgttggcttagtatgactgatgaaatgagaccatctatcggaaacgtctttaaagcgatggaaacgtttaagatagacgcggttagatattacgatggtaacatatacgatttagctaaagatataaatgcgatgtcatttgacagttttataagatctctacaaaatatctcttcaaagaaagataaactcactgtttatggaaccatgggactgctgtctattgtcgtagatattaacaaaggttgtgatatatccaatatcaagttcgctgccggaataatcattttaatggagtatatttttgataacacggatatgtctcatcttaaagtagcactctatcgtagaatacagagacgttatccaatagacgatgatgaagaagacagataa

SEQ ID NO: 15932 - DNA, 27 bp, unidentified
  source 1..27: mol_type = other DNA
  misc_feature 1..27: note = Synthetic
atgatatattgcatacttgatcaatag

SEQ ID NO: 15933 - DNA, 195 bp, unidentified
  misc_feature 1..195: note = Synthetic
  source 1..195: mol_type = other DNA
ttgatcggtatttgtgtagcagttaccgttgccatcctatacgcgatgtataataagatcaagaactcacaaaatccgaatccaagtccgaatttaaattcgcctcctccagaaacaagaaataccaagtttgtaaataatctggaaaaggatcatattagttcattgtataatctagttaaatcttcagcataa

SEQ ID NO: 15934 - DNA, 27 bp, unidentified
  misc_feature 1..27: note = Synthetic
  source 1..27: mol_type = other DNA
atgatatattgcatacttgatcaatag

SEQ ID NO: 15935 - DNA, 198 bp, unidentified; identical to SEQ ID NO: 11975
  misc_feature 1..198: note = Synthetic
  source 1..198: mol_type = other DNA

SEQ ID NO: 15936 - DNA, 57 bp, unidentified; identical to SEQ ID NO: 9343
  misc_feature 1..57: note = Synthetic
  source 1..57: mol_type = other DNA

SEQ ID NO: 15937 - DNA, 1038 bp, unidentified
  misc_feature 1..1038: note = Synthetic
  source 1..1038: mol_type = other DNA
atgagcaagcgcaagtttaaagaagaactgctgcagacgctggtgcctgagatctatggccctccggacgtgaagcctgacattaagccccgcgatatcaagcgtgttaaaaagcgggaaaagaaagaggaactcgcggtggtagacgatggcggagtggaatttattaggagtttcgccccgcgacgcagggttcaatggaaagggcggcgggtacaacgcgttttgaggccgggcaccgcggtagtttttaccccgggagagcggtcggccgttaggggtttcaaaaggcagtacgacgaggtgtacggcgacgaggacatattggaacaggcggctcaacagatcggagaatttgcctacggaaagcgttcgcgtcgcgaagacctggccatcgctttagacagcggcaaccccacgcccagcctcaaacctgtgacgctgcagcaggtgctccccgtgagcgccagcacggacagcaagaggggaataaaaagagaaatggaagatctgcagcccaccatccagctcatggtccctaaacggcagaggctggaagaggtcctggagaaaatgaaagtggacccaagcatagagccggacgtcaaagtcaggccgatcaaagaagtggcccctggtctcggggtgcagacggtggatatccagatccccgtcacgtcagcttcgaccgccgtggaagccatggaaacgcaaacggaaacccctgccgcgatcggtaccagggaagtggcgttgcaaaccgacccctggtacgaatacgccgcccctcggcgtcagaggcgacccgctcgttacggccccgccaacgccatcatgccagaatatgcgctgcatccgtctatcctgcccacccccggctaccggggagtgacgtatcgcccgtcaggaacccgccgccgaacccgtcgccgccgccgctcccgtcgtgctctggcccccgtgtcggtgcgccgcgtaacacgccggggaaagacagttaccattcccaacccgcgctaccaccctagcatcctttaa

SEQ ID NO: 15938 - DNA, 15 bp, unidentified
  source 1..15: mol_type = other DNA
  misc_feature 1..15: note = Synthetic
atgatctatctgtga

SEQ ID NO: 15939 - DNA, 75 bp, unidentified; identical to SEQ ID NO: 2440
  source 1..75: mol_type = other DNA
  misc_feature 1..75: note = Synthetic

SEQ ID NO: 15940 - DNA, 303 bp, unidentified
  misc_feature 1..303: note = Synthetic
  source 1..303: mol_type = other DNA
atagtacctgcaatatctgaaaaaatgagacgcgaacgagccgcatacgtaaactacaaacgtctaaacaagaatttcatttgtgtcgatgatagactgtttagttataattttacaacatctggaattaaggcaaaggtggccgttgataacaaaaatgttcccattccatgttccaagataaacgaggtcaataataataaagatgtcgatacactatattgtgataaagatagagacgatataccaggttttgcacgatcgtgttatagggcatattctgacttattttttactacctaa

SEQ ID NO: 15941 - DNA, 135 bp, unidentified; identical to SEQ ID NO: 9346
  source 1..135: mol_type = other DNA
  misc_feature 1..135: note = Synthetic

SEQ ID NO: 15942 - DNA, 24 bp, unidentified
  misc_feature 1..24: note = Synthetic
  source 1..24: mol_type = other DNA
ctggttcacttgtttgaaaactaa

SEQ ID NO: 15943 - DNA, 234 bp, unidentified
  source 1..234: mol_type = other DNA
  misc_feature 1..234: note = Synthetic
acgctgctgagcgcggagcacgtcgcgcacaaggttaacgggtacaacatgttccgtcgcagcttcttcccggacagcgacgtcttcgtgtacttcagcgactctctgagccgcgtggacctggagttcgccttcttcctgttcctggcgggcatcgtgggctcggtcaaggactggatagccgaatccatagccgccataaaagagttgtatatgattaattttaataactaa

SEQ ID NO: 15944 - DNA, 60 bp, unidentified; identical to SEQ ID NO: 9350
  source 1..60: mol_type = other DNA
  misc_feature 1..60: note = Synthetic

SEQ ID NO: 15945 - DNA, 591 bp, unidentified
  source 1..591: mol_type = other DNA
  misc_feature 1..591: note = Synthetic
atggaaagctactttagttactataacgacgagttcaccgccggcggcgttcaggacgccgagctcttcagcccggaggagcagaatgcctttctccccaaagaccccggcactgccgactcccccctagtcccggctaccccccggccagtgcccggagggaatatcgcgccttacagcgtccttcagtacgaggatatccgcatactaacaggtattgtgatttttgtattggccttgacgtccacccccgtgctcgctctagtaatgataggtattgcctcacttatcctcccgctgccgtgcctggtcatcggatactgcgcggccatgcagatcatgcacccctacgcggccaacaacaccggcatggccatcgtgtgcacgatcatgtccatcgtcaccatcatcgtgacgcacgtgaccgggtccgtgggcgccaccactttcatgtacatcgtgctcggcctgctgttcgccatctacgccttccgcctcactggccgcggtatcgtgcgcactcgctccgccgcgcccgcctgcccggtgtacgcgggcgccaagtcggaggacctgttcttcgccgagtag

SEQ ID NO: 15946 - DNA, 27 bp, unidentified
  source 1..27: mol_type = other DNA
  misc_feature 1..27: note = Synthetic
atgatatattgtatacttgatcaatag

SEQ ID NO: 15947 - DNA, 144 bp, unidentified; identical to SEQ ID NO: 13232
  misc_feature 1..144: note = Synthetic
  source 1..144: mol_type = other DNA

SEQ ID NO: 15948 - DNA, 24 bp, unidentified
  misc_feature 1..24: note = Synthetic
  source 1..24: mol_type = other DNA
atgttctcttcttttacagtatga

SEQ ID NO: 15949 - DNA, 366 bp, unidentified
  source 1..366: mol_type = other DNA
  misc_feature 1..366: note = Synthetic
atcgcacaaaaaagtgtcccggcccgagcgcagtccgacttcccgatgcagagaagcagcgcctgtatgggaataagtgtcccgacccgagcgcagaccgacctcccaaagcagagaagcagcgcctgtatgggaataagtgttccggcccgagcgcagtccgacctcccaaagcagaagagcagcgcctgtatgggaataagtgtcccggcacgagcgcagtccgacctcccaaaacagagaaagcagcgcctgtatgggaataaatgtcccggcccgagtgcagcccagctccccggagcagacagacaacgcctgtatgaaaagaagtggcccggccggagtgcggttcagcctgcggggtga

SEQ ID NO: 15950 - DNA, 57 bp, unidentified; identical to SEQ ID NO: 9359
  source 1..57: mol_type = other DNA
  misc_feature 1..57: note = Synthetic

SEQ ID NO: 15951 - DNA, 294 bp, unidentified
  source 1..294: mol_type = other DNA
  misc_feature 1..294: note = Synthetic
ctggagatcctccatacagccatggaacaggaacaggatacaccatggacacagtcaacagaacacaccaatattcagagaaggggaagtggacgacaaatacagaaactggggcaccccaactcaacccaattgatggaccactacctgaggataatgagccaagtggatatgcacaaacagactgtgtcctggaggctatggccttccttgaagaatcccacccaggtatctttgagaactcatgccttgaaacaatggaagtcgttcaacaaacaagggtggacaaactaa

SEQ ID NO: 15952 - DNA, 3498 bp, unidentified
  misc_feature 1..3498: note = Synthetic
  source 1..3498: mol_type = other DNA
atgaaaaaaaacactgtatttgaaatggatcaaataataggatataaatttcttgcacctgatccgaaagttggagttttttataggcctttacattttcaatacgtttcttattctaactttattaatcacaggcttcaagaaatactatctgtaaaaagaacccttttatcatttaaaaatgatacggaaaaaataatgatagaaatagataatataaaggtaactccaccagagtattctccgattatagctagtataaaaggtaaaagttatgatgcgctggtaacatttacagtaaatatttataaagaggtaatgacaaaagatggaacaacaattacaaaaataagcagttatgagggaaacgattcacatttaataaaaatacctcttcttattggatacggtaataaaaaccctttagatacagcaaaatatgttgttcctaacgtaataggaggtgtatttattaacaagcagtctgtagaaaaaataggaataaatttagtagaaaaaataacaacttggccaaaatttagagttataaaaccaaatgcgtttacgttttctttttcatcagtttctccatcatatgtattaccaacaaaatatagacattataaaataataatggatatatcgcagctggataattgttctatctcgtcaacaaaaacatttataactgttaatataattttgttagttcagtacttatcaagagtaagtttagattttattaaaaaaagtttatcttatgatatgccaagcgaaataatatatttagtaaattcgctaatagagagcacaaaagagttaataaaagatataagtgattttaacttagataattatataaatgatcttgtattatcagaatatacaaaacaaaaatcgcagttacaatatgaagaatttaaatatgaaatgataaataactttttacctcacatgtacgattcaccaaatcagttaaaagggttttacattattttgttattaagaaaattcatatattgcatttattttacttcaagatacccagatagggactctatggtgtgtcatagagtattgacgtacggaaaatattttgaaatacttgcacacgacgagttagaaaattacattggaaatataaaaacagatataataaacaatcacaaaaacaggggaacttattcagttaatattcacgtattaacaacaccaggctttaatcatgctttttctggacttttaagtggaaaatttaaaaaaacggacggtagttatagaacacatcctcattattcgtggatgcaaaatatatcaatacctagaagtgtaggttattaccccgaccaggtaaaaatatcaaaaatgttttctgttagaaaatatcatccaagtcaatacgcatacttttgtccgtctgacgtacctgaaagagggccacaggttggattagtttcacaattatctgtgctaacatcaataactaatatatgtactaacgaatacttagagttagaaaaaaaaatatattcatatataaaatcatttaattatgaggatataagttattttgaaacagggtattacataacgttagaaaattctttagttgcctcattaaatccagaaaaggtttacgactttgttaacgattttagaaggaaaaaaagaataggttattttggaaacttagaaattggtataactcttgttcaagatcatatgaacgaaattagaattaacataggaggtggaagactaataagaccatttttagttatagacaatggtgaattagtaatggatacagttattaaagatttagaagaaaaaattgaggactttacattctctgatatattaaaagaatttcctcatgttgttgaaatggttgatatagaacagtttacgtttagcaacgtgtgtgaatctgttcaaaaatttaaatctctttcaaaagcagaacgtgttaaatatcatttgtgcgattttccttcagagtttagagatggatatgttgcttcttcattagttggaataaaccacaattctggtcctagagcaattttaggatgtgcacaggcaaaacaagcaatttcttgcttaagttctgatataagaaataaaatagataatggtattcaccttatttatccagaaagacctatagtattaagtaaagcgttagaaacttcaaaaatagcagtaaattgttttggacaacatgttattatagctttaatgtcatataaaggaataaatcaagaagatggtattattattaaaaaacaatttgttgaaagaggtggattagacataataacagctaaaaaacatcaagtagaaataccgttagaaaactttaataacaaagaaagagtcaaatcaaccgcgtattcaaagcttgatagtaacggtttggttaaactaaacgcttttttagaaaatggggacgctatagcaagaaatatatcatcaaaaactttagaagacgattttgtaaacgataaccaaataagttttgacatttccgaaaggtatactgatatgtacaaatctagagttgaaagagtacaggtagatttaacagataaagtaaaagtaagagtgttaacaatgaaggaaagaagacctattttaggagataaatttactagtagaacaagccaaaaaggtacggttgcctttatagcagatgaaacagatttaccttacgacgatgaaggtataaaaccggacataataattaactcaacatcaattttttcaagaaaaactttatctatgttagttgaagtaatattaacagctgcgtatgctagtaaaccgtataataacaatgaacaaaatagaccaatatgttttcccagcagcaacgaaactagtattgatacgtacttagattttgcaaaacagtgttatgaatgcgtatatcctaatttagataaagacgaaatcgataataaagtattttgtgaaaaaatactgtacgatccagaaacagacgttccttataagtcaaaggtatttatgggcccaatatactacttaaggctaaggcacttaacacaggataaagcaactgtcagatgtagggggaaaaaaacaaaactaataagacaagcaaacgaaggtagaagacgaggaggaggaataaagtttggagaaatggaaagggactgtttaatagcacacggcgctgcaaatactataactgaggtgttaaaagattcagaagaagattaccaagaggtatacgtttgcgaaaattgtggcgacattacctcaagtgtaaaaggaaacaaaatttgcattagatgttcaaagcagaacctatctactattttaacaaaagtagatacaacacatgtatcaaaagtgtttataacacaaatgaatgctagaggtgttaaagtaaaaatggaatttgaaaaaagagatcctatgttttataagcctttggaatctgtggatttaaccccaaattttttaaattaa

SEQ ID NO: 15953 - DNA, 1623 bp, unidentified
  source 1..1623: mol_type = other DNA
  misc_feature 1..1623: note = Synthetic
atgtacaccttctggacaataacattaacaatattatcagtcatttttataatgatattgacaaacttaattcaagagaacaatcataataaattaatgttgcaggaaataagaaaagaattcgcggcaatagacaccaagattcagaggacttcggatgacattggaacctcaatacagtcaggaataaatacaagacttctcacaattcagagtcatgttcaaaactatatcccactatcattaacacaacaaatgtcagatctcagaaaatttatcaatgatctaacaaataaaagagaacatcaagaagtgccaatacagagaatgactcatgatagaggtatagaacccctaaatccaaacaagttctggaggtgtacatctggtaacccatctctaacaagtagtcctaagataaggttaataccaggaccaggtttattagcaacatctactacagtaaatggctgtattagaattccatcgttagtaatcaatcatctaatctatgcttacacctctaatcttattacccagggctgtcaagatatagggaaatcttaccaagtactacaaatagggataattactataaattcggacctagtacctgatttaaaccccagagtcacacatacatttaatattgatgataatagaagatcttgctctctggcactattgaatacagatgtttatcagttatgctcaacaccaaaagttgatgaaagatccgattatgcatcaacaggtattgaggatattgtacttgacattgtcactaataatggattaattataacaacaaggtttacaaataataatataacttttgataaaccgtatgcagcattgtatccatcagtgggaccaggaatctattataaggataaagttatatttctcggatatggaggtctagagcatgaagaaaacggagacgtaatatgtaatacaactggttgtcctggcaaaacacagagagactgtaatcaggcttcttatagcccatggttctcaaataggagaatggtaaactctattattgttgttgataaaggcatagatgcaacttttagcttgagggtgtggactattccaatgagccaaaattattggggatcagaaggaagattacttttattaggtgacagaatatacatatatactagatccacaagttggcacagtaaattacagttaggggtaattgatatttctgattatactaatataagaataaattggacttggcataatgtactatcacggccagggaatgatgaatgtccatggggtcattcatgcccagacggatgtataacaggagtttacactgatgcatatccgctaaacccatcggggagtgttgtatcatcagtaattcttgattcacaaaagtctagagaaaacccaatcattacttactcaacagctacaaatagaataaatgaattagctatatataacagaacacttccagctgcatatacaacaacaaattgtatcacacattatgataaagggtattgttttcatatagtagaaataaatcacagaagtttgaatacgtttcaacctatgttattcaaaacagaagttccaaaaaactgcagctaa

SEQ ID NO: 15954 - DNA, 24 bp, unidentified
  source 1..24: mol_type = other DNA
  misc_feature 1..24: note = Synthetic
attgtgcgcctttctcactgctag

SEQ ID NO: 15955 - DNA, 24 bp, unidentified
  misc_feature 1..24: note = Synthetic
  source 1..24: mol_type = other DNA
attgtgcgcctttctcactgctag

SEQ ID NO: 15956 - DNA, 1611 bp, unidentified
  source 1..1611: mol_type = other DNA
  misc_feature 1..1611: note = Synthetic
ctgttaactctccaaacacccaccggtcaaatccattggggcaatctctctaagataggggtggtagggataggaagtgcaagctacaaagttatgactcgttccagccatcaatcattggtcataaaattaatgcccaatataactctcctcaataactgcacgagggtagagatcgcagaatacaggagactactgagaacagttttggaaccaattagagatgcacttaatgcaatgacccagaatataagaccggttcagagtgtagcttcaagtaggagacacaagagatttgcgggagttgtcctggcaggtgcggccctaggcgttgccacagctgctcagataacagccggcattgcacttcaccagtccatgctgaactctcaagccatcgacaatctgagagcaagcctggaaactactaatcaggcaattgaggcaatcagacaagcagggcaggagatgatattggctgttcagggtgtccaagactacatcaataatgagctgataccgtctatgaaccaactatcttgtgatttaatcggccagaagctagggctcaaattgctcagatactatacagaaatcctgtcattatttggccccagcttacgggaccccatatctgcggagatatccatccaggctttgagctatgcgcttggaggagatatcaataaggtattagaaaagctcggatacagtggaggtgatttactgggcatcttagagagcagaggaataaaggcccggataactcacgtcgacacagagtcctacttcattgtactcagtatagcctatccgacgctgtccgagattaagggggtgattgtccaccggctagagggggtctcgtacaatataggctctcaagagtggtataccactgtgcccaagtatgttgcaacccaagggtaccttatctcgaattttgatgagtcatcgtgtactttcatgccagaggggactgtgtgcagccaaaatgccttgtacccgatgagtcctctgctccaagaatgcctccgggggtccaccaagtcctgtgctcgtacactcgtatccgggtcttttgggaaccggttcattttatcacaagggaacctaatagccaattgtgcatcaatcctctgcaagtgttacacaacaggaacgatcattaatcaagaccctgacaagatcctaacatacattgctgccgatcactgcccggtggtcgaggtgaacggtgtgaccatccaagtcgggagcaggaggtatccggacgcggtgtacctgcacagaattgacctcggtcctcccatatcattggagaggttggacgtagggacaaatctggggaatgcaattgctaagttggaggatgccaaggaattgttggagtcatcggaccagatattgaggagtatgaaaggtttatcgagcactagcatagtttacatcctgattgcagtgtgtcttggagggttgatagggatccccgctttaatatgttgctgcagggggcgctgtaacaaaaagggagaacaagttggtatgtcaagaccaggcctaaagcctgatcttacagggacatcaaaatcctatgtaaggtcgctctga

SEQ ID NO: 15957 - DNA, 57 bp, unidentified; identical to SEQ ID NO: 9370
  source 1..57: mol_type = other DNA
  misc_feature 1..57: note = Synthetic

SEQ ID NO: 15958 - DNA, 57 bp, unidentified; identical to SEQ ID NO: 9370
  source 1..57: mol_type = other DNA
  misc_feature 1..57: note = Synthetic

SEQ ID NO: 15959 - DNA, 135 bp, unidentified; identical to SEQ ID NO: 9371
  misc_feature 1..135: note = Synthetic
  source 1..135: mol_type = other DNA

SEQ ID NO: 15960 - DNA, 120 bp, unidentified
  source 1..120: mol_type = other DNA
  misc_feature 1..120: note = Synthetic
atgacctttatgttgctattagaggttcttgtgaaaagaacctacaacttatgcgtaaggttgacttgtataatggtgctgtcatttacatttttgccgaagagcctgttgttggtatag

SEQ ID NO: 15961 - DNA, 39 bp, unidentified; identical to SEQ ID NO: 9373
  misc_feature 1..39: note = Synthetic
  source 1..39: mol_type = other DNA

SEQ ID NO: 15962 - DNA, 294 bp, unidentified; identical to SEQ ID NO: 10916
  source 1..294: mol_type = other DNA
  misc_feature 1..294: note = Synthetic

SEQ ID NO: 15963 - DNA, 1056 bp, unidentified
  source 1..1056: mol_type = other DNA
  misc_feature 1..1056: note = Synthetic
atggggactatcgcagaattcaaccctgtgacatgggccgagcatggctcacttagccctatgttactcgagcaaggaccggataaaaagattatcccgcagtacagattcatagcacctaaacctgaagctggaaggacaaagatggattggtacctaactctcagtggtattatagaatgtaaatcacaatcaggagctggaagtgatacggcaccaacgacctccggcaaaaagattgtatccatgggaatgataccactaggtgtgggtcacactagggagacgccagatgcacttctggatgctgtggtgaagttgaaaataaccgtgcgtaggactgcccgaagctcagaaacactgatattcacattcgcagaagttgacccgaggcttgctccttggaactacaatctcaagagtgggatgggatttccatcgatgaaagtatcatcacaggctcatttgattcccgtcgatcaaagatgtactatgagaggtgtctttctgatcatcactgcactaggttcaggaagttactacaagatcccgagacctattcagaacttgacaatcgcggacacaatctctgtcaattttttggttgggttgacaactgacggggatttatcaaaagccggtttgatgaccacaagagactcggaaggccatcacacagttgaaacaatgatacatttgggtatattcaagaggaccaaaggcaagagttacacagtggaatattgccaggctaaagtactggctatggatctgacttttgcattggcaggtgtcggcggtgtttccctgcatgtgatcgttaatgggaaaattagcaaacagttattaacacaattagccgggcaccgatccatatgctactcactgatggatatcaatcctaagatcaacagtgtgttatggagacctatggtagagatatcctacatcaaagctgtgttccagcctagtatccccaaagagttcaagatctactcagatgtcatcgtcaagaaagcgggaagagtacagcagctgataaagaaaggattttaa

SEQ ID NO: 15964 - DNA, 1854 bp, unidentified
  misc_feature 1..1854: note = Synthetic
  source 1..1854: mol_type = other DNA
atgtcaccacaacgagaccgaataaatgccttctacaaagacaacccacatcctaagggaagtaggatagttattaacagagaacatcttatgattgatagaccttatgttttgctggctgttctattcgtcatgtttctgagcttgatcgggttgctagccattgcaggcattagactccatcgtgcagccatctacaccgcagagatccataagagcctcagcaccaatctagatgtaactaactcgatcgagcatcaggtcaaggacgtgctgacaccactcttcaagatcattggtgatgaagtgggcctgaggacacctcagagattcactgacctagtgaaattcatctctgacaaaattaaattccttaatccggatagggagtacgacttcagagatctcacttggtgtatcaacccgccagagagaatcaaattggattatgatcaatactgtgcagatgtggctgctgaagaactcatgaatgcattggtgaactcaactctactggaggccagggcaaccaatcagttcctagctgtctcaaagggaaactgctcagggcccactacaatcagaggtcaattctcaaacatgtcgctgtccctgttggacttgtatttaagtcgaggttacaatgtgtcatctatagtcactatgacatcccagggaatgtacgggggaacttacctagtgggaaagcctaatctgagcagtaaagggtcagagttgtcacaactgagcatgcaccgagtgtttgaagtaggggttatcagaaatccgggtttgggggctccggtgttccatatgacaaactattttgagcaaccagtcagtaatgatttcagcaactgcatggtggctttgggggagcttaaattcgcagccctctgtcacagggaagattctatcacaattccctatcaggggtcagggaaaggtgtcagcttccagctcgtcaagctaggtgtctggaaatccccaaccgacatgcgatcctgggtccccctatcaacggatgatccagtgatagataggctttacctctcatctcacagaggtgttatcgctgacaatcaagcaaaatgggctgtcccgacaacacggacagatgacaagttgcgaatggagacatgcttccagcaggcgtgtaagggtaaaaaccaagcactctgcgagaatcccgagtgggcaccattgaaggataacaggattccttcatacggggtcttgtctgttaatctgagtctgacagttgagcttaaaatcaaaattgcttcaggattcgggccattgatcacacacggttcagggatggacctatacaaaaccaaccacaacaatgtgtattggctgactatcccgccaatgaagaacctagccttaggtgtaatcaacacattggagtggataccgagattcaaggttagtcccaacctcttcactgttccaatcaaggaagcaggcgaggactgccatgccccaacatacctacctgcggaggtggatggtgatgtcaaactcagttccaatctggtaattctacctggtcaggatctccaatatgttttggcaacctacgatacttccagggttgaacatgctgtggtttattatgtttacagcccaagccgctcattttcttacttttatccttttaggttgcctataaagggggtcccaatcgaattacaagtggaatgcttcacatgggacaaaaaactctggtgccgtcacttctgtgtgcttgcggactcagaatctggtggacatatcactcactctgggatggtgggcatgggagtcagctgcacagtcactcgggaagatggaaccaatcgcagatag

SEQ ID NO: 15965 - DNA, 735 bp, unidentified
  misc_feature 1..735: note = Synthetic
  source 1..735: mol_type = other DNA
acggggagcatgtccgactccaaggaggtccctagccttccatttttgcgacacttgctcgaagagttggacagccatgaggacagcttgctgctgtttctgtgtcacgacgcggccccgggctgcacgacggtcacgcaagctttgtgctcgcttagccaacagcgcaagctgaccctcgcggctctggtcgagatgctctacgtgctgcagcgtatggatcttctcaagagccgcttcgggctcagcaaggagggggccgagcaattgctgggcacaagctttctcacgcgctaccgcaagctcatggtttgcgtgggtgaggagctcgactcgagcgagctacgcgctctacgcttgttcgcgtgcaacctgaatccgagcctgagcacggcgctttctgagagcagccgctttgtcgagcttgtactcgcgcttgaaaacgtaggactcgtctcgccatcgagtgtttccgtgcttgcggacatgttgcgcactcttcggcgcctcgatttgtgccagcagcttgttgagtacgaacaacaagagcaagccaggtaccgttactgttacgcggcctcgccctcattgccagttcgtacgttacgtcgggggcacggcgcgagtgaacacgagcagctgtgcatgcccgtgcaagaatcctctgacagccccgagctgctgcgcacgcccgtacaagaatcctccagcgacagccccgagcaaacgacttga

SEQ ID NO: 15966 - DNA, 981 bp, unidentified
  misc_feature 1..981: note = Synthetic
  source 1..981: mol_type = other DNA
atgagtatactacctgttatatttcttcctatatttttttattctccattcgttcagacttttaacgtgcctgaatgtatcgacaaagggcaatattttgcatcattcatggagttagaaaacgagccagtaatcttaccatgtcctcaaataaatacgctatcatccggatataatatattagatattttatgggaaaaacgaggagcggataatgatagaattatacagatagataatggtagcaatatgctaattctgaacccgacacaatcagactctggtatttatatatgcattaccacgaacgaaacctactgtgacatgatgtcgttaaatttgacaatcgtgtctgtctcagaatcaaatatagatcttatctcgtatccacaaatagtaaatgagagatctactggtgaaatggtatgtcccaatattaatgcatttatttctagtaacgtaaacgcagatattatatggagcggacatcgacgccttagaaataagagacttaaacaacggacacctggaattattaccatagaagatgttagaaaaaatgatgctggttattatacatgtgttttagaatatatatatatgggcaaaacatataacgtaaccagaattataaaattagaggtacgtgatagaataatacctcctactatgaaattaccagaaggagtagtaacttcaataggtagtaatttgactattacatgcagagtatcgttgagacttcccacaacggacgctgacgtcttttggataagtaatggtatgtattacgaagaagaagacgaggacggagacggtagaataagtgtagcaaataaaatctatatgactgataagagacgtgttattacatcctggttaaacattaatcctgtcaaggaagaagatgctacaacgtttacgtgtatggcgtttactattcctagcatcagcaaaacagttactgttagtataacgtga

SEQ ID NO: 15967 - DNA, 204 bp, unidentified
  misc_feature 1..204: note = Synthetic
  source 1..204: mol_type = other DNA
acgacgcccacgtacggtccacgtcgcccttcaatgtctctcttgaccaataggcgtagccggcgagttgacaaggaccagtgggggccgggggcttggagagggactccaagtcccgcccttcccggtgggccgggaaatgcatggggccacccagctccgcggcggcctgcagccggggtagcccaagaatccttcgggtga

SEQ ID NO: 15968 - DNA, 120 bp, unidentified; identical to SEQ ID NO: 9391
  misc_feature 1..120: note = Synthetic
  source 1..120: mol_type = other DNA

SEQ ID NO: 15969 - DNA, 6495 bp, unidentified
  misc_feature 1..6495: note = Synthetic
  source 1..6495: mol_type = other DNA
atgggtgcacaagtatctagacaaaatgttgggacacactccacacaaaattcagtgagcaatggatctagcttaaattatttcaacatcaattattttaaagacgcagcttcaagtggtgcttctagattggatttttctcaagaccctagtaaatttactgatcctgttaaagatgtgttagaaaagggtattccaacacttcaatcaccaacagttgaagcttgtggttattcagacagactaatacagataacccgaggagattccactataacatcccaagatactgcaaatgcagttgttgcttatggtgtgtggccatcatacttgactccagatgatgcgactgctattgacaaacccacacaacctgatacatcatccaacagattctacaccttggacagtcgttcttggacatctgcctcatctggatggtggtggaaattgcctgatgcccttaaaaacatgggtatatttggtgaaaatatgttttaccattttctagggagatctggatacacaatacatgtacaatgtaattctagcaagtttcatcagggtttattaatagttgccgccatcccagaacatcaattggcatctgcaacaagtggaaatgtatcagtcgggtacaatcacacccacccaggtgagcaaggtagagaagtagtaccatcacggacatctagtgataataaaagacctagtgatgacagttggttaaattttgatggaacattacttggtaacttacctatttatccccaccaatacattaatctaaggactaacaattcagctacccttattttaccttatgtcaatgctgtaccaatggactctatgcttagacataataattggagcttggttataatcccaatatgccctcttcaggtccaacctggggggacacaatccatacctataacagtatcaattagccctatgttttcagaattttcagggccaagaagtaaggttgtgtttagtaccactcagggtttaccagttatgttaacacctggatctgggcaattcttaacaactgatgatactcaatccccatcagcgtttccatacttccacccgaccaaggaaatatttatacctggacaagttaggaatttaattgaaatgtgccaagttgacacactcattcctgttaacaatacacaggaaaatgtaagatctgtgaatatgtacactgttgatttacgcacacaagttgatttagctaaagaagtcttttctataccagtagatattgcctcacaacctttagccactactctcataggagaacttgcaagctattacacacactggactggtagtctgcgctttagctttatgttttgtggttctgctagctctactttgaaactattaattgcatacactcctcctggtgttggaaaacctaaatccaggagagaagccatgcttggtacacatttagtgtgggatgtggggttgcagtccaccgcctcactagttgtaccatgggttagtgctagccattttagattcactacacctgacacatattcctcagctggttatattacatgctggtaccagaccaactttgtagtacctgatagtactccagataacgccaaaatggtgtgcatggtttctgcatgcaaagatttttgcttaagattagccagagatactaacctacacacacaagaaggagtactcacacaaaacccagttgaaaattatatagatagtgtattaaatgaagttcttgtggtgccaaatatccaacctagcacatctgtgtcaagtcatgcagcgcctgcattggatgctgcggaaaccggacacaccagctctgttcaacctgaagatatgattgaaactagatatgttataactgatcaaacaagggatgaaacaagtattgagagtttcttaggtaggtcagggtgtatcgctatgatagaatttaatacaagtagtgataaaactgaacatgataaaattggtaaaggattcaaaacatggaaggttagtcttcaagaaatggcacaaatcagaagaaaatatgaattattcacatatacaagatttgattcagagataacaatagtcactgcagccgcagctcaaggaaatgatagtggacatatagtattgcaatttatgtatgtacccccaggagcacctgtccccgaaaaacgtgatgattacacatggcaatcaggaacaaatgcatctgtgttctggcaagaaggacaaccataccccagattcacaatcccttttatgagcattgcatcagcctattacatgttttatgatggttatgatggtgatagtgcagcatcaaaatacggttctgtagtcactaatgatatgggaaccatatgtgttagaatagtgacatccaaccaaaaacacgattcaaatattgtgtgccgcatttaccacaaggccaaacatataaaagcatggtgtcctcgcccaccaagggctgttgcctatcaacacacacactcaaccaattacataccatccaatggtgaggccacaactcagattaaaaccagacctgatgtttttaccgttacaaacgtcggaccatctagtatgtttgtacatgtgggtaacttaatctatagaaatcttcatctctttaattctgatcttgatgattctattcttgtatcatactccagtgatctaatcatatatcgaacaaacactgaaggtaatgatgtgatccctaattgtgattgcactgaatgtacatattactgccaccacaaagataggtattttcctatcagagttactgcacatgattggtatgagattcaagaatcagaatattacccaaaacatatccaatataatctcctgattggagagggtccttgtgaaccaggagattgtggaggaaaactattgtgtaaacatggtgttataggtatgattacagctggaggtgaaggtcacgttgcttttattgacctgagaaaattccagtgtgctgaggagcaagggttatctgattatgtggaacatcttggtcaagtctttggtgtaggcttcgtagacagcatcaaacaacaggtaaactttatcaaccccactagtaaaattggttcaaaagtgattaaatggttgttgaggatagtttcagctatgataataatggtaaggaatagttctgatccacaaactgtaattgccactctcacccttctaggttgttcaggctcaccatggaggtttcttaaagagaaactctgtgcgtggctccagcttagctatgtacataagcagtctgattcatggctcaagaaatttactgaagcgtgtaacgcagcacgtgggctagagtggattggacaaaagatatctaaatttatagattggataaagagtatgttaccacaggctcaattgaaaattgattacctaaccaaattaaaacaacttaatctcttagagaaacaaatagaaacaattagacttgcacctgctagtgttcaggagaaaattttcattgaaataaacacccttcatgatttatccttaaaattcttaccactgtatgcatctgaagcacgtagaattaagaatttatatatcaaatgcagtaatgttattaaagggggaaagaggaatgaaccagttgcagttctaatacatggttctcctggtactggaaaatctcttgccacttctgttcttgctcgaatgctaactgttgagactgatatatattctttgcccccagatcctaaatattttgatgggtatgatcaacagagtgttgttatcatggatgatatcatgcaaaatcctagtggtgaagacatgactttgttttgccaaatggtatcgagtgtccctttcatacctcctatggcagatcttccagataaaggaaaaccatttacatccaagtttgtacttgcaagcactaatcacactctactaacaccaccaacagtatcttcattaccagcaatggcaagaaggttttactttgatctagacattcaagttaagaaagagtatcttttagatggcaaactagatatagcaaaaagctttcgaccatgtgatgttaatattaaaataggcaatgctaagtgctgtccatttatctgtggaaaagctgtagagtttaaagatagaaattcatgtacaaccttgtctttatctcaattgtatagtcatataaaggaagaagataggagaagaagcagtgcagcacaagcaatggaggctatatttcaaggtatagacctccaatctcctccacctccagccatagctgacctccttaggtctgtgaaaacaccagagatcattaagtattgccaagataataattggattgttccagcagagtgttctattgaaagagatttagggatagcaaatatgactataggtataatagctaatgtggtctctatagtaggtgttatctatataatttataaattgttctgtacacttcagggtccatactcaggggaacctaaacccaaaagcagagctccagagagaagagtagttactcagggcccagaggaagagtttggtcgctcactactcaaacataattgctgtgttgtgacaaccgacaaaggcaaattcacaggtcttggcatatatgaccaagtcatggtacttccaacacattctgacccaggctctgagatcttggtagatggagtaaaagttaaggtctctgattcctatgatttgcataaccatgagggtgttaagctagagatcacagttgtgaaattaattagaaatgagaagtttaaagacatcagaaaatatttaccctcacgtgaagatgactatcctgcttgtaaccttgccttactagctaatcaagatgagccaacaataataagtgttggtgatgcagtatcttatggtaacatcttattgagtggtaccaatactgcacgaatgatcaagtaccattacccgacaaaagctggatattgtgggggtgttttgtacaaggttggctctattcttggtatacatgttggtggcaatggtagagatggattttctgcaatgcttctcaaatcttattttggtgaaacccagggtttaatcactaaagaacttcctgtatctgtaaagaacttaccatccgtacatgtttcatctaaaacccgactacaacctagtgtttttcatgatgttttccctggaacaaaagagcctgcagttcttagtagtaatgatccaagactagaaactgactttgactcagcacttttctccaaatataaaggtaatcctgcttgtcaagtgaccccacacatgaaaattgctgtagcacattatgcagcacagttatctacactagacataaatcctcaacccctttcattggaagagagtgtgtttggtattgagggattagaagctttggatttaaatactagtgcaggatttccttatgtttcactgggaataaagaagaaagatcttatagataaaaagaccaaagacatcacaaaacttaggaaagcaattgatgaatatggtattgatttgcctatggttacttttctgaaagatgaacttagaaagaaggaaaaaataaaagatggaaagactagagtcatagaagctaatagtgtgaatgatactgtgttattcagaagtgtatttggaaatcttttctctgctttccacaaaaacccaggtatagtcactggttcagcagtagggtgtgaccctgaagtattctggtcaactatacctctcatgctagatggagaatgtttaatggcttttgattattcaaactatgatggtagcctacatcccgtttggtttaaatgtcttagtatgctcttagaagacataggtttctcctctcaacttattaaccagatctgtaactctaaacatatatacaaatctaagtattatgaagtggaaggaggtatgccatctggatgtgctggtactagtatttttaatacaataatcaacaatattatcattagaactttggtactagatgcttataagaacatagatctagataaactgaaaatcttagcatatggggatgatgtcatcttttcttataattttaaacttgacatggcagttcttgccaaagaaggagaaaaatatggactaacaatcacccctgctgataagtctgatgttttccaagaattgacctataaaaatgtaacttttcttaaaagaggattcagagctgatgagcgccactctttccttatacaccctacctttcctgtggctgagattcatgactccatcagatggaccaaaaacccttcatgtatgcaggaacacgtgctatctttgtgtcatttaatgtggcataatggtagacatgcataccaggaattcattaaaggtatacgcagtgtatctgccggtcgggcactgtatataccagcttatgaagttcttgaacatgaatggtatgaaaaattttag

SEQ ID NO: 15970 - DNA, 228 bp, unidentified
  misc_feature 1..228: note = Synthetic
  source 1..228: mol_type = other DNA
gtgcatatgccccgcacggagtcgcggacacgcttcctccggcgtcacgggcacgggccttccgcggagtcgttggcacttgcccctctcttcgtgcgtacggagacgcgcgttgctggcgtgttcctactcgcacagaccaagcaggtggccctcgcgtcgcggcggtatctcgacgcgcgttgttggtgcgactccggatgtgcctccgctttcccccctctataa

SEQ ID NO: 15971 - DNA, 363 bp, unidentified
  source 1..363: mol_type = other DNA
  misc_feature 1..363: note = Synthetic
atcgcttcccgacctccggtcccgatggccgtcccgcaatttcaccgccccagcaccgttaccaccgatagcgtccgggcgcttggcatgcgcgggctcgtcttggccaccaataactctcagtttatcatggataacaaccacccgcacccccagggcacccaaggggccgtgcgggagtttctccgcggtcaggcggcggcgctgacggaccttggtctggcccacgcaaacaacacgtttaccccgcagcctatgttcgcgggcgacgccccggccgcctggttgcggcccgcgtttggcctgcggcgcacctattcaccgtttgtcgttcgagaaccttcgacgcccgggaccccgtga

SEQ ID NO: 15972 - DNA, 627 bp, unidentified
  source 1..627: mol_type = other DNA
  misc_feature 1..627: note = Synthetic
atgcctttcttccagaaggtactgaacgtcttcgagagccttcgtcatcctcggcactcgcgtccgcatcggcgccgccccgccagcaagtttatttccgggattgacctcgcgacgggaaccgtgctggtctcggaaaatccgcgcccgcgcggctcgcgcactactcgtcttgcgcgccactgcggcaacgagcacgtgtgcggagagccgcctttgcgctgtctctccgagtcgcgcctcgaactgctcgaccaaatgcgcgtgcggcgcaacctcaaggaaacagacctgcgcatgaaaatggcaacaggcccgcgccgcgggcgcggaaatgccgctgacatcgagacctctgggctaatcaccccgtacgcggtcgtagaccttctcgcgtacgaagaagaagagatcttgttttctcgcttcgagcgccacttctctcctccgccgctcccccccaagcacaacgcgcacgttcgcgccgcggccgcggcaggcactctagtgcccacgcaccaccgcgtggccgagtacacgctgccgcgcctagctcgcgcgcccagcctgacgacgaaggcactagtctcgccgctcatgctgcgccgcgagctcgttgctgtgtaa

SEQ ID NO: 15973 - DNA, 54 bp, unidentified; identical to SEQ ID NO: 9399
  source 1..54: mol_type = other DNA
  misc_feature 1..54: note = Synthetic

SEQ ID NO: 15974 - DNA, 1008 bp, unidentified
  misc_feature 1..1008: note = Synthetic
  source 1..1008: mol_type = other DNA
ctgaacaattcgcccaagatgacgaacgtatttccatgctggagttcagtgacggagaatccatcggaagccatgacacagttccaggaactcgtttccgattcaccaagaggttttgcatcgtcacttacagtcagacaccgccagactttgatgctgacgcaattgtgcgaatattacaccgagactgcagaggttgcattgtcgcacgagagtcacacctggatggaggcactcattatcatgctttcgtggactacggaacacctcgggattggacaaactctcgtcgatgggatgtacttggcgtgcacccgaacattaagccagtctcgcgaactccgtttaatgcatatgcatacgtcggaaaggacaagaacgttgttcatgagtgttttacggaagccactcgaccaaggcctggaagacagactggaaatgctcaaggaaatcgccaacgcgcatgggctgagatcgcaaatgcaccagacaaagaccagttttttgcgacatgcaaggcgctggatccgagaagtcttatcacatgcttcgggaacgtttccagatacgcagattacgcctttccaagtgtacgaagacaatacgagtccccaaccgggatcaccattggactctctgagtatccacgacttagagaatatttctccgattggctcggacaacgagggcgacctatctcactcatgctatggggtccttccagaaccgggaagaccctactcgcccgctcgttcggacagcataactacttcggtgggatgttcaatcttgatgagtatgaggacagctccgaatacaatgtattcgacgaccttagtggaggactcgcaagctggttctcctacaaacagtggcttggagggcagaccgacttcacctgcactgacaaataccgacacaaacgagttgttcgaggtgggaagcccaccatctattgctctaatgacgagccaggagtggatggaggtgttgaccgagattggctga

SEQ ID NO: 15975 - DNA, 735 bp, unidentified
  source 1..735: mol_type = other DNA
  misc_feature 1..735: note = Synthetic
atggcatcccctgctgcacctcgtgctgtttcctttgccgataacaatgatataacaaatacaaacctatctcgaggtagaggacgtaatccaaaaccacgagctgcaccaaataacactgtctcttggtacactgggcttacccaacacgggaaagtccctcttacctttccacctgggcagggtgtacctcttaatgccaattctacccctgcgcaaaatgctgggtattggcggagacaggacagaaaaattaataccgggaatggaattaagcaactggctcccaggtggtacttctactacactggaactggacccgaagcagcactcccattccgggctgttaaggatggcatcgtttgggtccatgaagatggcgccactgatgctccttcaacttttgggacgcggaaccctaacaatgattcagctattgttacacaattcgcgcccggtactaagcttcctaaaaacttccacattgaggggactggaggcaatagtcaatcatcttcaagagcctctagcttaagcagaaactcttccagatctagttcacaaggttcaagatcaggaaactctacccgcggcacttctccaggtccatctggaatcggagcagtaggaggtgatctactttaccttgatcttctgaacagactacaagcccttgagtctggcaaagtaaagcaatcgcagccaaaagtaatcactaagaaagatgctgctgct

SEQ ID NO: 15976 - DNA, 42 bp, unidentified; identical to SEQ ID NO: 9404
  misc_feature 1..42: note = Synthetic
  source 1..42: mol_type = other DNA

SEQ ID NO: 15977 - DNA, 27 bp, unidentified
  misc_feature 1..27: note = Synthetic
  source 1..27: mol_type = other DNA
gtgttggaagatcaaccaaggatgtga

SEQ ID NO: 15978 - DNA, 42 bp, unidentified
  misc_feature 1..42: note = Synthetic
  source 1..42: mol_type = other DNA
ataatccagattccgagtatatataacataacagattggtaa

SEQ ID NO: 15979 - DNA, 420 bp, unidentified
  source 1..420: mol_type = other DNA
  misc_feature 1..420: note = Synthetic
ataaattattttttgaggtctctggagacagcctctatagaagacaacccagccaaccttgcaaagatggggtcattccaccagcaccaggagcagaatcagcttgcccagaaatatcgactcgctccatatacaagaaaaagaaaagaccccaatccatctatgatatcttacagggagacctcgactcagacggaatgctcacggaaagagcttatgagagaattactggagataatagatgtgaccagccaaccagaatgggggatgtcccccatagggtcccccccagaaagcgagtcagattcagactctctgatagaaaactccagcacaggaagcgggagctcatcagaattttattgggaagacgagaccaacccagggggggagggtccccccctagtccccccccagtag

SEQ ID NO: 15980 - DNA, 1908 bp, unidentified
  source 1..1908: mol_type = other DNA
  misc_feature 1..1908: note = Synthetic
attttgaccgcgaaatttgaacgagcagcagccatgccggggttctacgagattgtcctgaaggtcccgagtgacctggacgagcgcctgccgggcatttctaactcgtttgttaactgggtggccgagaaggaatgggacgtgccgccggattctgacatggatccgaatctgattgagcaggcacccctgaccgtggccgaaaagcttcagcgcgagttcctggtggagtggcgccgcgtgagtaaggccccggaggccctcttttttgtccagttcgaaaagggggagacctacttccacctgcacgtgctgattgagaccatcggggtcaaatccatggtggtcggccgctacgtgagccagattaaagagaagctggtgacccgcatctaccgcggggtcgagccgcagcttccgaactggttcgcggtgaccaaaacgcgaaatggcgccgggggcgggaacaaggtggtggacgactgctacatccccaactacctgctccccaagacccagcccgagctccagtgggcgtggactaacatggaccagtatttaagcgcctgtttgaatctcgcggagcgtaaacggctggtggcgcagcatctgacgcacgtgtcgcagacgcaggagcagaacaaagagaatcagaaccccaattctgacgcgccggtcatcaggtcaaaaacctcagccaggtacatggagctggtcgggtggctggtggaccgcgggatcacgtcagaaaagcaatggattcaggaggaccaggcctcgtacatctccttcaacgccgcctccaactcgcggtcccagatcaaggccgcgctggacaatgcctccaagatcatgagcctgacaaagacggctccggactacctggtgggcagcaacccgccggaggacattaccaaaaatcggatctaccaaatcctggagctgaacgggtacgatccgcagtacgcggcctccgtcttcctgggctgggcgcaaaagaagttcgggaagaggaacaccatctggctctttgggccggccacgacgggtaaaaccaacatcgcggaagccatcgcccacgccgtgcccttctacggctgcgtaaactggaccaatgagaactttcccttcaacgattgcgtcgacaagatggtgatctggtgggaggagggcaagatgacggccaaggtcgtggagagcgccaaggccattctgggcggaagcaaggtgcgcgtggaccaaaagtgcaagtcatcggcccagatcgaacccactcccgtgatcgtcacctccaacaccaacatgtgcgccgtgattgacgggaacagcaccaccttcgagcatcagcagccgctgcaggaccggatgtttgaatttgaacttacccgccgtttggaccatgactttgggaaggtcaccaaacaggaagtaaaggactttttccggtgggcttccgatcacgtgactgacgtggctcatgagttctacgtcagaaagggtggagctaagaaacgccccgcctccaatgacgcggatgtaagcgagccaaaacgggagtgcacgtcacttgcgcagccgacaacgtcagacgcggaagcaccggcggactacgcggacaggtaccaaaacaaatgttctcgtcacgtgggcatgaatctgatgctttttccctgtaaaacatgcgagagaatgaatcaaatttccaatgtctgttttacgcatggtcaaagagactgtggggaatgcttccctggaatgtcagaatctcaacccgtttctgtcgtcaaaaagaagacttatcagaaactgtgtccaattcatcatatcctgggaagggcacccgagattgcctgttcggcctgcgatttggccaatgtggacttggatgactgtgtttctgagcaataa

SEQ ID NO: 15981 - DNA, 1149 bp, unidentified
  misc_feature 1..1149: note = Synthetic
  source 1..1149: mol_type = other DNA
gtgaagatcgagtctgcacaccttccgaaagccatggcgcacgagccaatccccttctctttcctgcggaatctgctggcagagctggacgctagcgagcacgaggtcttacggttcctgtgccgcgatgtggcgcctgctagcaagactgcagaagacgctttgcgagcgttgcagagacggcgtctgctgacactctcgagcatggcagaactgctctgtgcgctccggcgctttgacgttctcaaggtccgctttggtatgacgcgcgagtgcgcggggcgcttgctggggcacggtttcctttcgcagtacaggcttcaagttgctgccatcaacaacatggtcgggagcgaagacctacgcgtcatgtgcctttgcgcgggaaagctcttgccgccaagctgcacgccgcgctgccttgtcgatcttgtctccgcgctcgaggacgcgggggctatctctccgcaggacgtttctgtcctggtgaccctccttcacgccgtttgcagatacgatctttccgtggcgctgtcggcagtagcacatgggcacatgactgtgggcgtgggaacgccagtacaggacgagcccatggacgtgctcgaagtcgatgacgcggagcccatggaagcgacaccagcgtgcgatgagatcggagttgtcaagctcgcgggcgcggcttccgcgggggcgcctctcgcggacggggcttttgcagcctgtacgagcgcgggcaagggcgaggacctcgcaacatcggatctcacggactccgagcccgaggactctgttttcgcggtcgcggatccggtgtacgcagacgtggacttgtccatgtttgtgcgcgcgaacgctactgcagattcctccatgtttgtgaacgcggacgcgggtgcagactcctcgcttgtgaacgcggacgcgggtgcagattcctcgcttgtgaacgcggacgcgggtgcagactcctcgcttgtgaacgcggtcgcggatgcaaactcctcgttaatgcgcacgacctcggcttgtacggactccgagcccgaggactctgcagggccatcgtgcgcgggcatggccttgtccatgtttgggcgcgcgaaatcggtgtcgtcgcttcttctgcgaacgaaagcttcctactag

SEQ ID NO: 15982 - DNA, 93 bp, unidentified
  source 1..93: mol_type = other DNA
  misc_feature 1..93: note = Synthetic
acgaggtcttacggttcctgtgccgcgatgtggcgcctgctagcaagactgcagaagacgctttgcgagcgttgcagagacggcgtctgctga

SEQ ID NO: 15983 - DNA, 837 bp, unidentified
  source 1..837: mol_type = other DNA
  misc_feature 1..837: note = Synthetic
atgttttgcacctcaccggctacgcggggcgactcgtccgagtcaaaacccggggcatcggttgatgttaacggaaagatggaatatggatctgcaccaggacccctgaacggccgggatacgtcgcggggccccggcgcgttttgtactccgggttgggagatccacccggccaggctcgttgaggacatcaaccgtgtttttttatgtattgcacagtcgtcgggacgcgtcacgcgagattcacgaagattgcggcgcatatgcctcgacttttatctaatgggtcgcaccagacagcgtcccacgttagcgtgctgggaggaattgttacagcttcaacccacccagacgcagtgcttacgcgctactttaatggaagtgtcccatcgaccccctcggggggaagacgggttcattgaggcgccgaatgttcctttgcataggagcgcactggaatgtgacgtatctgatgatggtggtgaagacgatagcgacgatgatgggtctacgccatcggatgtaattgaatttcgggattccgacgcggaatcatcggacggggaagactttatagtggaagaagaatcagaggagagcaccgattcttgtgaaccagacggggtacccggcgattgttatcgagacggggatgggtgcaacaccccgtccccaaagagaccccagcgtgccatcgagcgatacgcgggtgcagaaaccgcggaatatacagccgcgaaagcgctcaccgcgttgggcgaggggggtgtagattggaagcgacgtcgacacgaagccccgcgccggcatgatataccgcccccccatggcgtgtag

SEQ ID NO: 15984 - DNA, 837 bp, unidentified; identical to SEQ ID NO: 15983
  misc_feature 1..837: note = Synthetic
  source 1..837: mol_type = other DNA

SEQ ID NO: 15985 - DNA, 24 bp, unidentified
  misc_feature 1..24: note = Synthetic
  source 1..24: mol_type = other DNA
atggatctgcaccaggacccctga

SEQ ID NO: 15986 - DNA, 24 bp, unidentified
  misc_feature 1..24: note = Synthetic
  source 1..24: mol_type = other DNA
atggatctgcaccaggacccctga

SEQ ID NO: 15987 - DNA, 1575 bp, unidentified
  misc_feature 1..1575: note = Synthetic
  source 1..1575: mol_type = other DNA
attctatttcaacctgtactcgactctgaatacgttatttcttttattgacagaatgattgcggaggatagagaatatggaacgtttgaatctgtaacccaggcttatcagcagatcattagtcatactttacagctgagacgatatgaatttgaaactgggtgcatgattatgttttctgctaattctggaaaatgtgagatgctctctaatggttggatttcaatgatttcatggacttcagaaaccgatacggccggctcattgacattggatatttgtactgagggagggcagtgcaaaacttacagtgccagaggtcatatattatgttctaaaaacatcacttcaatttctcagaaaaacgagggaaaggaaaaagttttgacgatttgtcatgacaatggaaaattgcatttaacttatatcacagttctaaaaagcggccttgattgtgatatcaaagaccaaaaactggagaaactgtttgaaaaagaacatgcagaacgaaaaaagcaagatgatgattataaaaaaaaagctcttaaacaaaaagataaacgccgttctgagcaaaaaattttggaagactgtgataaaaaagatgaaaaaaaaagaatggatgacaccgaaaaaagaaaactacaagaggaccgtcgaaacgaaaaacaagacctaaaaaaaagagtagatgacaccgaaaaaagaaaattagaagatgaccgtcgaaacgaaaaacaagacctcgaagatgcatccaaagaaaaaaggatgaaagtgcatcacgaaaaacgtcatgcggaagaacaagcaaacgaagaggttgcttcttcgagtcagttatcaagtagaataccagagggtgcgttatcgcccactatttctattgatcttcaggaatatcaagaatttgaggattttgacaagcgcatttgtgggcaggggaagaatcaagacgctgtatgcaagaaagtccaaagtgatgaaagtttttgtataaataaaccgttagagcagtttagagagaaactaataaaaattactcatgaagctgtacaacagtcactgttacaatcgcggggaaaaaatgaggataataaaaaagatgttacccaaaatgtaaaattcgctgatgaaaatatgaatttcgcagggggttctaaatgtacttctaaaactaagcatattgaagatcaacaaatacagtttggggcacaaaatagatttgttcctatatgtgaaataaaaccatttattgatgtcaaccttttaaaatcaaatgtaagaggtagaaggagtactcgtggaagaagaaactcaaactccgctagattttcggcctctacttttgaacaaccaattgaaacttctgagatgctgacggtttcgactcgatccagaggacgttccaggggaaggccaagaggcagaggcagatccagaaacatgtcaatgagacaaactccaagagaagttgaagacatgttaccgattgttttggacagtgacagtgacacggagactttaaggcgtaatgaagatttattggcgtcttccatattacagactttataa

SEQ ID NO: 15988 - DNA, 21 bp, unidentified
  source 1..21: mol_type = other DNA
  misc_feature 1..21: note = Synthetic
atggaacgtttgaatctgtaa

SEQ ID NO: 15989 - DNA, 60 bp, unidentified; identical to SEQ ID NO: 9422
  source 1..60: mol_type = other DNA
  misc_feature 1..60: note = Synthetic

SEQ ID NO: 15990 - DNA, 615 bp, unidentified
  source 1..615: mol_type = other DNA
  misc_feature 1..615: note = Synthetic
atgggctccagtgagcaggaactgaaagccattgtcaaagatcttggttgtgggccatattttttgggcacctatgacaagcgctttccaggctttgtttctccacacaagctcgcctgcgccatagtcaatacggccggtcgcgagactgggggcgtacactggatggcctttgcctggaacccgcgctcaaaaacatgctacctctttgagccctttggcttttctgaccaacgactcaagcaggtttaccagtttgagtacgagtcactcctgcgccgtagcgccattgcttcttcccccgaccgctgtataacgctggaaaagtccacccaaagcgtgcaggggcccaactcggccgcctgtggactattctgctgcatgtttctccacgcctttgccaactggccccaaactcccatggatcacaaccccaccatgaaccttattaccggggtacccaactccatgcttaacagtccccaggtacagcccaccctgcgtcgcaaccaggaacagctctacagcttcctggagcgccactcgccctacttccgcagccacagtgcgcagattaggagcgccacttctttttgtcacttgaaaaacatgtaa

SEQ ID NO: 15991 - DNA, 30 bp, unidentified; identical to SEQ ID NO: 9429
  source 1..30: mol_type = other DNA
  misc_feature 1..30: note = Synthetic

SEQ ID NO: 15992 - DNA, 24 bp, unidentified
  source 1..24: mol_type = other DNA
  misc_feature 1..24: note = Synthetic
atgttgacgggaaaaaggatttga

SEQ ID NO: 15993 - DNA, 756 bp, unidentified
  misc_feature 1..756: note = Synthetic
  source 1..756: mol_type = other DNA
gtgggtgtgattaaaaaaccgctgcacttgggcaatcgcaaaaacatgttgttcttgtcttttttactcgtgtgtctttgtgaagaggtgcgaatgctcaacctaatgactacagaagtttcggcaactgaatttgcatcaattgcgtctaaaaacatggaaacggatgtatcgacatccagcgactatttaactgggaaatccgaaaccacgttttcggcgaattctgaaacgtggggtaaaaatgttaccgaaatatctatagattctgagacatatttaaatcagtcttttatggtgacctctacgttagccgtggaaaccacagatcgatccattggcaataatgtaaatgttacaagttcgtttccgacggtcaagggtgatgagacgcagaacattgagacgtctttcacagtaatatcggcgtcgacattttccgatgtgtctgaaaagacgcctcagggtttgtcgacgaaatccacaccgaaaaagacggttcaggctctttgggaaactgatactgttcaagtccttgagtttacagatacacatgagggagatgaggagtattttaaagattttctaagttcattagtaatttggatcggcgggattagttttatcggggcgttcgtaattctgatagtcattttgtgtaattggtataagaaagacaagcagaggtctttgttttgggatgaagagaaaaaaccggatgtacaaatgaggagggatgtaaagacttgcagatga

SEQ ID NO: 15994 - DNA, 78 bp, unidentified; identical to SEQ ID NO: 9433
  source 1..78: mol_type = other DNA
  misc_feature 1..78: note = Synthetic

SEQ ID NO: 15995 - DNA, 78 bp, unidentified; identical to SEQ ID NO: 9433
  source 1..78: mol_type = other DNA
  misc_feature 1..78: note = Synthetic

SEQ ID NO: 15996 - DNA, 78 bp, unidentified; identical to SEQ ID NO: 9433
  misc_feature 1..78: note = Synthetic
  source 1..78: mol_type = other DNA

SEQ ID NO: 15997 - DNA, 60 bp, unidentified; identical to SEQ ID NO: 8483
  source 1..60: mol_type = other DNA
  misc_feature 1..60: note = Synthetic

SEQ ID NO: 15998 - DNA, 21 bp, unidentified
  source 1..21: mol_type = other DNA
  misc_feature 1..21: note = Synthetic
atggtcacagcatatatataa

SEQ ID NO: 15999 - DNA, 6537 bp, unidentified
  source 1..6537: mol_type = other DNA
  misc_feature 1..6537: note = Synthetic
atgggcgctcaagtttcaacacagaaaagtggatctcatgagaatcaaaatatattaactaatggatctaatcaaaccttcacagttattaattattacaaagatgcagctagttcatcttcagctggacaatctttttcaatggatccatctaagttcacagagccagtcaaagatttaatgttgaagggggcaccagcactgaattcaccgaatgttgaagcatgtggttacagtgatagggttcaacaaatcaccctgggcaattccaccataactactcaggaagcagctaacgcaattgtgtgttacgctgagtggcctgagtacctgtcagataatgatgctagtgatgtaaataaaacatcaaaaccagacatttctgtatgtagattttacacattagatagcaaaacatggaaagctacttccaaaggctggtgttggaagttgcccgatgctcttaaggacatgggagtatttggccagaatatgttttaccattcacttggtagaacaggttacacaatacatgtacagtgcaatgctaccaaatttcatagtggctgcctattggttgtggttatcccagaacaccaattagcatctcatgagggaggaacagtttcagttaaatacaagtacacacatccaggagatcgaggtattgatctagacactgttgaagttgcaggtggccctaccagcgacgccatctacaacatggacggaactcttctaggcaatcttttgattttccctcaccaatttataaatttgaggacaaacaacactgctacaatagttgttccttatatcaattcagtacctattgactcaatgaccagacacaacaatgtatcactgatggttgttccaatagctccacttaatgcacccactggatcttctcctacattacctgtgactgttacaattgcaccaatgtgcacagaatttactggtattagatctagatccattgtaccacaagggttacccactactacccttccaggatctggtcaatttctcactacagatgacagacaatcaccaagtgccttacctagttatgaacctacaccgaggatacatattccagggaaagtgagaaatttattagagataatacaagtgggtacattgattccaatgaacaacacaggaacaaatgataatgtcacaaattacctcataccactgcatgcagatagacaaaatgagcagatatttggcacaaaactctacattggtgatggtgttttcaagactactttattgggtgaaatagctcagtactacacacactggtctggatctcttagaatttcactcatgtacacaggaccagccctatccagtgcaaagatcattttagcatacactccccctggcacgcgtggtccagaagatagaaaggaagcaatgttgggaacacatgttgtatgggatattggcttacaatccaccatagttatgaccattccatggacatcaggtgtacaatttagatacacagaccctgatacttatactagtgctgggtatctatcatgctggtatcagacatcactcatacttccaccacaaaccagtggtcaagtctaccttttatcttttatcagtgcttgtcctgatttcaaacttagattaatgaaagacacacaaaccatctcgcagactgatgctttgacagagggtcttagtgacgagttggaggaagtcattgtcgagaaaactaaacagacattggcctcagtctcctcaggacctaagcacactcagagtgttcctgctctaactgctaatgaaacaggtgccacactccccacacgaccatcagacaacgtggaaactagaactacttacatgcatttcaatggttcagaaacagatgtagagagcttcctcggcagagcagcttgtgtgcatgtgacagaaatcaaaaacaagaacgcagctggcttggataatcacaggaaggaggggttgttcaatgattggaaaattaacctttcaagtcttgtccagcttagaaagaagttagaactctttacttatgtcagatttgactcagaatacactattctggccacggcttcacaaccagaggcgtccagttattccagcaatctaacagtccaggcaatgtatgtgcctcccggtgcacctaaccctaaggaatgggatgattacacatggcaaagtgcttctaaccccagtgtgtttttcaaagttggtgagacatccaggtttagtgtcccttttgtaggcatagcatcagcatataattgtttttatgatgggtactcacatgatgatccagacactccttatggcataacagtactaaatcacatgggtagcatggcattcagagtggttaatgaacatgatgttcataccacgattgtgaaaattagagtttaccacagagccaaacatgtggaagcatggattccaagagcacctagagccttgccatacgtgtctattggacgcactaactaccccagagattcaaaaacaataataaagaagaggacaaacataaaaacatatgggctaggacccaggtttggtggggttttcacaagcaatgtgaaaataataaattaccaccttatgactccagatgatcacctaaacttagtagccccttacccaaatagagatttagcagtagttgctactggagcacatggagcagaaactatcccccactgcaactgcacatccggtgtttactactccagatattacaggaagttctatcccatcatttgtgagagacccactaacatctggattgagggtagctcgtactacccaagtagataccaagctggagtaatgaaaggtgttggaccagcagaaccaggagactgtggtgggatacttagatgtatacatggccccatcggattgttaacagctggtggaggcggttatgtctgttttgcagacataagacaattggatttcattgctgatgagcagggcctaggtgattacattaccagtttagggagagcatttggcactggttttactgatcaaatctcagcaaaggtttgtgaacttcaggatgttgcaaaagattttctaacaacaaaggtattatccaaggtagtaaaaatgatttcagccctagtcatcatctgtagaaaccatgatgatctagttactgttactgctaccttagccctactaggatgtgatgggtctccctggaggttcctcaaaatgtacatatcaaaacattttcaagtaccttacattgaaagacaagcaaatgatggctggttcagaaaatttaatgatgcttgcaacgctgcaaagggattggaatggattgctaataaaatttcaaaactcatagaatggatcaaaaacaaggttctgccccaagccagggaaaagcttgagttttgtagcaaactaaagcaactagacatattagagagacaaatagcatccatacatgactcgaatcccactcaagagaaaagagagcagctatttaacaatgttttgtggttagaacaaatgtcacaaaaattctcacccttatatgcctcagaagcaaagagaatcagggacctcaaaaacaagatcactaattacatgcagtttaagagtaagcaaagaactgagccagtgtgtgttttaatacacggcacaccaggttctggcaaatcactaactacatccattgtgggccgcgcattggcagaacattttaattcatctgtttattctttacctcctgatccaaaacattttgatggttaccagcaacaagaggtggttattatggatgacttgaaccaaaacccagacggacaggatattagtatgttttgtcaaatggtctcatcagtagatttcttaccacccatggctagtttagacaataaaggaatgttgtttactagtaactttgtgttggcctcaaccaattcaaacactctaagtccccccactatcttgaacccagaagctctgattagacggtttggatttgatttggatatttgcatgcacagcacatacacaaagaatggtaagttgaatgcagcaatggcaaccagtttgtgtaaagattgtcaccagccttcaaattttaaaaaatgttgcccattagtctgtggcaaagctatcagtttggtagatagggtctctaatgttagatttagtattgatcaattagttactgccatcataaatgattacaaaaataaggtgaaaattacagattcacttgaagtgttatttcaagggcctgtgtacaaggacctggaaattgatatatgtaatacacctccacccgagtgtatcagtgacttattgaaatcagtagattcagaggaagtcagagaatattgcaagaaaaagaaatggattattccacaaatttccactaacatagaaagggcagttaaccaagcaagtatgataatcaatacaattttgatgtttgtcagtacattaggtatagtttatgtcatatacaaactttttgctcagacacaaggaccttactctgggaatccagttcataacaaactcaaaccacccactttaaaaccagttgtggtacaagggcctaatacagagtttgctttgtccttactcaggaaaaatatactcacaatcaccacagagaaaggggaattcactagtttgggtattcatgatcgtatctgtgtcttaccaacacatgcccaaccaggtgataatgtcctcgtgaatggacagaaaatccaaattaaagacaaatacaaactagtagatccagataatactaatttagaactcaccataatagagttagacaggaatgaaaaattcagggatattaggggtttcatatcagaggatttggaaggattagatgctactttagtagtgcactccaatggatttactaatactatattagatgtaggaccaataaccatggctggacttataaatttaagtaatacaccaacaaccaggatgatccgctatgactacccaacaaaaacagggcagtgcgggggtgtgttgtgcacaacaggaaaaatatttggaatacatgttggtggtaatggtagacgaggattttcagcacaactcaaaaagcaatactttgtggagaaacagggattaattgtatctaaacaaaaggtgagagatattggtctaaacccaataaacacacccaccaaaaccaagcttcatcctagtgtgttttacaatgtgttccctggaagcaaacaacccgctgtgctcaatgacaatgaccctagacttgaagtgaaattagctgaatctttgttttcaaagtataaaggtaatgtccagatggaaccgactgaaaacatgctgatagctgtagatcattatgcagggcagttgatgtcattagatatctctactaaagagctaacactaaaagaagcactgtatggagtagatggcttagaaccaatagatgtaacaaccagtgcaggatacccctatgttagtttagggataaagaagagagacatattaaacaaagaaactcaagatgtagagaaaatgaagttttacttagataaatatggaatagacttgccattagttacatacataaaagatgagctcaggagcgtagacaaagtgcgcttgggaaagagcagactgattgaagcttctagtttaaatgattctgtcaacatgagaatgaaactaggtaacctgtacaaagcttttcaccaaaatccaggtataataacagaatctgcagtgggatgtgatccagatgtcttttggtctgttataccttgtttaatggatggacatttgatggcatttgattattcaaactttgatgcgtctctttcaccagtctggtttgaatgtttagagaaagttttaaataagttaggctttaaacaaccctcattaatacagtcaatttgcaatacacaccatatttttagagatgaaatttatagagtagagggaggtatgccatcaggttgttcaggaaccagtatattcaattccatgataaacaacataattatcagaacattaattttggatgcttataaaggcatagaccttgatagtctcagaatactagcttatggtgatgacttaatagtttcatacccctttgaactagattctaacattttggcagcaatagggaaaaattatggtttaactattactccacctgataagtcagatgcatttacaaaaataacatgggaaaacattacattccttaaaaggtattttagacctgacccacagtttccctttttgatccatccagtaatgccaatgcaagatatctatgagtcaatcagatggacaagggatccaaggaatactcaagatcatgttagatcactatgcatgctagcttggcattcaggtgagaaagactacaatgatttcataaccaagatcagaacaacagacattggcaaatgtcttaatctacctgaatacagtgtcctgcgtagacgctggttggatttattttaa

SEQ ID NO: 16000 - DNA, 1272 bp, unidentified
  source 1..1272: mol_type = other DNA
  misc_feature 1..1272: note = Synthetic
atggcaccaaaaagaaaagcatcatccacctgtaaaacacccaaaagacaatgtatacctaagccgggatgctgccctaatgttgcctcagttccaaaactgcttgttaaaggaggagtggaagtattatctgtggttactggagaagatagcattacccaaattgagttgtatttgaatccaagaatgggagttaattcccctgatcttcctactacttcaaactggtatacttatacttatgacctgcagccaaagggatcatctccagatcagcccatcaaggaaaatttgccagcttacagtgtggcaagagtgtctctgccaatgctaaatgaggatattacctgtgacacattgcagatgtgggaggcaatatctgttaaaacagaagtagttggaataagttctttaattaatgttcattattgggacatgaaaagagttcatgattatggtgctggtattcctgtgtcaggggtaaattaccatatgtttgccattgggggagaacctctggatttgcaaggcctagttttagattaccagactgagtatccaaaaactacaaatggtgggcctattacaattgaaactgtattgggaagaaaaatgacacctaaaaatcagggcctagatccacaagctaaagcaaaattagataaagatggaaattatcctatagaagtatggtgtcctgatccttctaaaaatgaaaacagtagatactatgggtctattcagacaggctctcagactcctacagttcttcaatttagtaatactctaactactgtccttttagatgagaatggagtgggccctctatgcaaaggagatggcctatttattagctgtgcagacatagtggggtttctgtttaaaaccagtggaaaaatggctcttcatgggttgcctagatattttaatgttactttgagaaaaagatgggtgaaaaacccctacccagtagttaatttaataaactcactcttcagcaacttaatgccaaaagtgtcaggccaacctatggaaggaaaagataatcaggtagaagaggttagaatatatgaggggtcagaacaattacctggtgatcctgatattgtcagatttttagataaatttgggcaggagaaaactgtttacccaaagccctctgttgccccagcagcagtaacattccaaagtaatcagcaggataagggcaaggcgccactgaaaggacctcaaaaggcctctcaaaaagaaagccaaacacaagaattatga

SEQ ID NO: 16001 - DNA, 222 bp, unidentified
  source 1..222: mol_type = other DNA
  misc_feature 1..222: note = Synthetic
atgtctatgggggcgctaacggatcttgggcaaaatatgctgtacgcaaactcagcccatgctctagacatgacatttgaggtggatccaatggatgagcctacccttctttatgttttatttgaagttttcgacgtggtacgcattcaccagccacaccgcggcgtcattgaagcggtctacctgcgcacgcccttctcggcgggtaacgctaccacctaa

SEQ ID NO: 16002 - DNA, 222 bp, unidentified
  misc_feature 1..222: note = Synthetic
  source 1..222: mol_type = other DNA
atgtccatgggcgcgctcaccgacctcggccagaacatgctctatgctaactccgcccacgcgctagacatgaatttcgaagtcgaccccatggatgagtccacccttctctatgttgtcttcgaagtcttcgacgtcgtccgagtgcaccagccccaccgcggcgtcattgaggccgtctacctgcgcacccccttctcagccggtaacgccaccacataa

SEQ ID NO: 16003 - DNA, 237 bp, unidentified
  misc_feature 1..237: note = Synthetic
  source 1..237: mol_type = other DNA
atgagtccacccttctctatgttgtcttcgaagtcttcgacgtcgtccgagtgcaccagccccaccgcggcgtcattgaggccgtctacctgcgcacccccttctcagccggtaacgccaccacataaattcttgcttcttgcaagaagccatggccgcgggctccggcgagcaggagctcagggccatcatccgcgacctggggtgcgggccctacttcctgggcaccttcgataa

SEQ ID NO: 16004 - DNA, 630 bp, unidentified
  source 1..630: mol_type = other DNA
  misc_feature 1..630: note = Synthetic
atgttcgtggccagttggttcccccgcgagcggggccctgcgggacgcgtctcaacgtgggagtcacagccctggtcgcaggcgaggacccccatcttgacacacgtcccccgacgcagacacttgcgcgtgacgagaccggcagagccagcgaggagccgttcccccctcgagggggcggcaacgccgccagagctccactcgggcccgcaccacaatcatccccacgccggctccggagaaccagcccggagacagggtcaacccagcctcgttccggcatcttgcctggcacgcacgccttccgctggcgcggaggttccttgcgcgcgacaagcgccccccgcgcgcgccacagagccgggccgccccaggcagtccgtcgctccgtgcttgcacgagatcccgaggccttctgcaaagaggcgccgatgttctcgcagcgcgcccgactccctagcgctgcggtatccgtggcgcagcaacacctcagctgcgcccgtgctctccccttccggcgagaggcggcacgagagctacgtttcgcgttttccctccgagggatgcaccgcctcgtgcccgcgttgcctctgcgcggggagcggcggatttgtccctcggagtggctag

SEQ ID NO: 16005 - DNA, 4140 bp, unidentified
  source 1..4140: mol_type = other DNA
  misc_feature 1..4140: note = Synthetic
acgcctcgcgctcacgccgccgccgcgatggagaactggtcggcgctcgagctcctgcctaaagtaggcattcccactgactttctgacgcacgtcaagaccagcgccggcgaggagatgttcgaggccttacgcatctactacggcgatgaccccgagcgttacaatattcacttcgaagccatcttcggcaccttctgcaatcgcctggaatgggtttattttttgaccagcggcttggccgcggcggcgcacgccatcaagttccacgacctcaataaactgactacgggaaaaatgctgttccacgtacaggtgccgcgggtggccagcggcgccggtttgcctaccagtcgtcagaccaccattatggtcaccaaatacagtgaaaaatcccccatcaccatcccctttgagctcagcgcagcctgcctcacgtatctgcgcgagacgttcgaaggcaccatcctggacaagatcctcaacgtggaagctatgcacacggtgctgcgcgcgctcaaaaacacggccgacgccatggaacgcggcttgattcacagctttttacagacactgctacgcaaggcgccgccgtactttgtggtgcagacgctggtagagaacgccacgctggcgcgacaggcgctgaaccgcatccagcgaagcaacatcttgcagagcttcaaggccaaaatgctggccacgctctttttgctgaatcgcacgcgcgatcgcgactatgtgctcaagttcctcacgcgtctggccgaagcggccaccgatagcatcctagacaaccccaccacgtacaccacgagctcgggggccaagatcagtggcgtgatggtaagcacggccaacgttatgcagatcatcatgtcgctgctctcaagccacatcaccaaagaaacggtctcggcgccggccacctacggcaattttgtactcagtcccgaaaatgccgtcactgccatatcctatcactcgatcctggccgatttcaactcgtacaaggctcatctgacttcgggccaaccgcatttgcccaacgactcgctttcgcaggccggggcgcacagcttaacgccgctgagcatggacgtgatccgactgggcgaaaaaacggtgattatggaaaacttgcggcgcgtctacaaaaacaccgataccaaagatccgctagaacgtaacgtggacctgacgtttttcttccccgtagggctgtatctgcccgaggatcgcggttacaccacggtggaaagcaaagttaagcttaacgacaccgttcgcaacgcgttgcccaccacggcctacctgctaaaccgggaccgtgccgtacaaaaaatagactttgtggacgcgctcaagacgctgtgccacccggtgctgcacgagcccgcgccctgtctacagaccttcacggaacgcggaccaccctcggaacccgccatgcaacgactgctcgagtgtcgttttcagcaggaacccatgggcggtgcggcgcgccgcataccgcatttttaccgcgtacgacgcgaggtcccgcgcacggtgaacgaaatgaagcaggactttgtggtcaccgacttctacaaggtgggcaacatcacgctctacaccgagctgcaccccttcttcgactttacgcactgccaggaaaacagcgaaacggtggcgctgtgtacaccgcgtatcgtcatcggtaatttgccagatggactggcaccgggccccttccacgaactgcgcacctgggagatcatggaacacatgcgactgcggccaccacccgactacgaagagacgttgcgacttttcaaaaccaccgttacaagccccaattaccccgagctttgctacctggtcgacgtgctggtacacggcaacgtcgacgcttttttgctaatccgcactttcgtagcacgttgtatcgtcaacatgtttcacacacgtcagctgctggtttttgcgcacagctacgcgctggtgacgttgatcgccgaacacctggctgatggcgccctaccaccgcagttgctctttcactaccgcaatctggtcgccgtgctgcgtctggtaacgcgcatctcagcgctgccgggacttaacaacggtcaactggctgaggaaccgctatcggcttacgtgaacgcgctgcacgaccaccggctgtggccccccttcgttacgcacctgccgcgtaacatggaaggcgtacaggtagtggccgaccggcaaccgttgaacccggccaacatcgaggcgcgacaccacggcgtttcggacgtaccgcgtttgggcgccatggatgccgacgagccgctgtttgtggacgattaccgtgccaccgacgacgaatggacgttacaaaaggtcttttatctctgcctcatgcccgccatgaccaacaaccgggcctgcggcctgggactcaacctcaagacgctgctagtagacctcttttaccgaccggcgtttctcctgatgccggccgccaccgcggtctccacgtcaggtacgacgtcgaaagagagcacaagcggcgtcacccccgaagactcgatagcggcgcaacgtcaagccgtaggcgagatgctgaccgagctggtggaggacgtcgccaccgacgcacatacgccgctgctgcaggcctgtcgtgaactgtttttggccgtgcaattcgtgggcgagcacgtcaaggtgctcgaagtgcgcgcgcctctggaccacgcgcagcgtcagggcctgccggactttatctcacgtcagcacgtgctttacaacggctgctgcgtcgtgacggcgcctaagacgttgatcgagtacagcctacccgtacctttccaccgtttctactcaaaccccaccatctgcgcggcgttgagcgacgacattaaacgctacgtgaccgagttcccgcactatcaccgtcacgacggtggtttcccgctacccacagccttcgcgcacgagtaccacaactggctgcgctcgcccttttcgcgttactcggccacctgtcccaacgtgttgcactcagtcatgacgctggccgccatgttatacaaaatctcaccagtttcactggtgctgcagaccaaggcgcacatccacccgggattcgcactcacggccgtacgcaccgacaccttcgaggtggacatgctgctctacagcggcaaatcatgcacgtcagttatcatcaacaaccctatcgtgaccaaggaggaacgcgacatcagcaccacgtaccacgtcacgcagaacattaacaccgtagacatgggtctgggttacacgtcaaatacctgcgtagcctacgtaaaccgcgtgcgaaccgacatgggcgtccgcgtgcaggacctctttcgcgtcttccctatgaacgtgtaccggcacgacgaggtggaccgctggatccggcacgcggccggcgtagaacggccgcaactgttagacacggagaccatctccatgctgacgttcggcagcatgtccgagcgcaatgccgccgccacggtgcacggacaaaaggccgcgtgcgaactaatccttacgccggtgacgatggacgttaattactttaagatccccaacaacccgcgcgggcgtgcctcctgcatgctggccgtcgatccgtacgacacggaggccgccaccaaggccatctacgaccatcgcgaagcggacgcacagactttcgcggccacacacaacccctgggcctcgcaagccggctgtctgagcgacgtactctacaacacccgacatcgcgaacgtctaggctacaactccaaattctacagcccttgcgcgcagtactttaacacagaagagattatcgcggccaacaaaacgctcttcaaaaccatcgacgagtacctgctacgcgccaaggactgcatccgcggcgacacggacacgcagtacgtctgcgtcgaaggcacggaacaactcatcgaaaacccgtgccgtctgacgcaggaagcgctaccgatcctcagcaccaccacgctggcgctgatggagaccaaactcaagggtggcgccggggcttttgctacgtccgaaacgcactttggtaactacgtcgtaggcgaaatcatcccgctgcagcaatccatgttatttaactcgtga

SEQ ID NO: 16006 - DNA, 1905 bp, unidentified
  source 1..1905: mol_type = other DNA
  misc_feature 1..1905: note = Synthetic
atgaacctgcacgcggcgtacatcgactacgcgctgcggcgctcgcagcacatgcaggccgagatgagcggcgccgacaacgtgctgctcaaggactaccagctcttcgtggccaaagtcttcctggggctggacagcatgaactcgctgctgctcttccaggagaccggcgtcggcaagaccgtgacggccgtgtacatgctcaagcacctgcgcttcctctacaccagctggacggtgctggtgctggtcaagaaggcgctggtggaggagccgtggatgaacaccatcctgcgctttgcccccgaggtggccaaggactgcgtcttcatgaactacgacgaccagaacttccacaacaagttcttcactaacatcaagactgtcagcgcgcgcagccggatcttcgtcatcatcgacgagtgccacaacttcatctccaagtcgttgtcgcgcgaggacggacgcgcgcgcaacaccaagcacgtgtacaacttcctggcgcgccacatcgccagcagccacaacaagctgctgtgcctctcggccacgcccatcgtcaacaacgtgcgcgagttcgcgctgctggtgaacctgctccggcccggcgtgctgccgccgcagtcgctcttccacaacaagcgcctgctggacgaggcggagcttgtgtccaagctgggctgcatctgctcgtacctggtacaccacgaggcgtccatcttcgaggacgtcgagggcagcgagcttttcgcgcgcaagcgcgtactgctcaagtacgtgcgcatgtccgccaagcaggaggacatctaccacaaggcgcgcgccgccgagttccgctcgggcatcgccgtcttccgcgtgcatcgccgcatggccgccaccttcgccttcgacgagttcccggtgcgcaagaacctcacgcccgacgagtacgacgcgctggtagccagcctggtgcgcgacttcgaggcgctcttcgcgggccgcgcgctgtcggacgcgacgcgagctcgcctgcgcgccggggagcccatcgagtgcgccgccagcgccgaggacctgtcgctgtaccaggcactttacgagcacagctgcaagtacgccgaggtctgcgtggccatcctggcctcgccaggaaagtgcctggttttcgagcccttcattaacctctcgggcatacgcattttcgtcaagtacctggaagtcttcggcatttcctacatcgagttttcctcgcgcaccaaagacacgcgcacgcgcgccgtggccgagttcaaccgcgtagagaacaccaacggcgagctcatcaaaacctgcgtcttctcgctcagcggcaacgagggcatcagctttctctcgatcaacgacatttttatcctggacatgacatggaacgaggcgtcgctcaagcagatcatcgggcgcgccatccgcctgcacagccacgccaacaacccgcccgagcgccgctacgtaaacgtgcacttcgtggtggcgcagctcggatcgggggcgccctcggtcgacgacgacctgctcgagattattcagaacaaggcacgcgagttctcgcagctctaccgtgtgctcaagctggcgtccatcgagtggattcaccagcactgccgcgagttcgcgcctgtggacgacgaggcgggcttccgcgcgctgtgctcgcgcgccattgacgtgacccgcggcgcgagtacgcgccgcgcgctggccactggcgagaacatctggtatgccttctccacgctcatgatcaccgtgcacccgggctttaagacggaggacgggcgcgtctacgacgcggacgggaactttctcaccaccatgcccgagcgccccatcgtgcgcgtgcagggcacgcgcctggtgtatatctttccggagcttcgctag

SEQ ID NO: 16007 - DNA, 51 bp, unidentified
  misc_feature 1..51: note = Synthetic
  source 1..51: mol_type = other DNA
aggactaccagctcttcgtggccaaagtcttcctggggctggacagcatga

SEQ ID NO: 16008 - DNA, 24 bp, unidentified
  misc_feature 1..24: note = Synthetic
  source 1..24: mol_type = other DNA
attattgttaaaggacagcattag

SEQ ID NO: 16009 - DNA, 1029 bp, unidentified
  misc_feature 1..1029: note = Synthetic
  source 1..1029: mol_type = other DNA
atggcggccgaggatttcctaaccatcttcttagatgatgatgaatcctggaatgaaactctaaatatgagcggatatgactactctggaaacttcagcctagaagtgagcgtgtgtgagatgaccaccgtggtgccttacacgtggaacgttggaatactctctctgattttcctcataaatgttcttggaaatggattggtcacctacattttttgcaagcaccgatcgcgggcaggagcgatagatatactgctcctgggtatctgcctaaactcgctgtgtcttagcatatctctattggcagaagtgttgatgtttttgtttcccaatatcatctccacaggcttgtgcagacttgaaatttttttttactatttatatgtctacttggatatcttcagtgttgtgtgcgtcagtctagtgaggtacctcctggtggcatattctacgcgttcctggcccaagaagcagtccctcggatgggtactgacatccgctgcactgttaattgcattggtgctgtcgggggatgcctgtcggcacaggagcagggtggtcgacccggtcagcaagcaggccatgtgttatgagaacgcgggaaacatgactgcagactggcgactgcatgtcagaaccgtgtcagttactgcaggtttcctgttacccctggccctccttattctgttttatgctctcacctggtgtgtggtgaggaggacaaagctgcaagccaggcggaaggtaaggggggtgattgttgctgtggtgctgctgttttttgtgttttgcttcccttaccacgtactaaatctactggacactctgctaaggcgacgctggatccgggacagctgctatacgcgggggttgataaacgtgggtctggcagtaacctcgttactgcaggcactgtacagcgccgttgttcccctgatatactcctgcctgggatccctctttaggcagaggatgtacggtctcttccaaagcctcaggcagtctttcatgtccggcgccaccacgtag

SEQ ID NO: 16010 - DNA, 1029 bp, unidentified; identical to SEQ ID NO: 16009
  misc_feature 1..1029: note = Synthetic
  source 1..1029: mol_type = other DNA

SEQ ID NO: 16011 - DNA, 27 bp, unidentified
  source 1..27: mol_type = other DNA
  misc_feature 1..27: note = Synthetic
atgatgaatcctggaatgaaactctaa

SEQ ID NO: 16012 - DNA, 27 bp, unidentified
  misc_feature 1..27: note = Synthetic
  source 1..27: mol_type = other DNA
atgatgaatcctggaatgaaactctaa

SEQ ID NO: 16013 - DNA, 24 bp, unidentified
  misc_feature 1..24: note = Synthetic
  source 1..24: mol_type = other DNA
ttggcgatcacaaaagagatataa

SEQ ID NO: 16014 - DNA, 753 bp, unidentified
  misc_feature 1..753: note = Synthetic
  source 1..753: mol_type = other DNA
atctccagtgagaccgggatcgaaatactggagtttgtggtaaataccctaatgggagacgacccggaaccgccagtgcagcctttcgatccacctacgctgcacgatctgtatgatttagagatagacgggccggaggatcccaatgaggaagctgtgaatgggttttttactgattctatgctgctagctgctgatgaaggattggacataaaccctcctcctgagacacttgttaccccaggggtggttgtggaaagcggcataggtgggaaaaaattgcctgatctgggagcagctgaaatggacttgcgttgttatgaagagggttttcctcccagtgatgatgaagatggggaaactgagcagtccatccataccgcagtaaatgagggagtaaaagctgccagcgatgtttttaagttggactgtccggagctgcctggacatggctgtaagtcttgtgaatttcacaggaataacactggaatgaaagaactattgtgctcgctttgctatatgagaatgcactgccactttatttacagtcctgtgtctgatgatgagtcaccttctcctgattcaactacctcacctcctgaaattcaggcgcccgcacctgcaaacgtatgcaagcccattcctgtgaagcctaagcctgggaaacgccctgctgtggataagcttgaggacttgttggagggtggggatggacctttggaccttagtacccggaaactgccaaggcaatga

SEQ ID NO: 16015 - DNA, 249 bp, unidentified
  source 1..249: mol_type = other DNA
  misc_feature 1..249: note = Synthetic
aggaacggggacaaaattcgtctacgtttgaccctaaacaagcgtaccagcgctttatcgatgagcacagagacgagctcacacttgagaatattagggtcttcttcctgcgcgcgaatgaggctaagcagaagctccgtaagagttcggcaaagctcgctaaccttaaatttggcacttggaaggtccctgttgttaataaccattaccctgccaacactgcaaatacggtcgctgatggtgaactaa

SEQ ID NO: 16016 - DNA, 249 bp, unidentified; identical to SEQ ID NO: 16015
  misc_feature 1..249: note = Synthetic
  source 1..249: mol_type = other DNA

SEQ ID NO: 16017 - DNA, 48 bp, unidentified; identical to SEQ ID NO: 9481
  source 1..48: mol_type = other DNA
  misc_feature 1..48: note = Synthetic

SEQ ID NO: 16018 - DNA, 39 bp, unidentified; identical to SEQ ID NO: 9482
  source 1..39: mol_type = other DNA
  misc_feature 1..39: note = Synthetic

SEQ ID NO: 16019 - DNA, 519 bp, unidentified
  misc_feature 1..519: note = Synthetic
  source 1..519: mol_type = other DNA
atgcgagagacaaaatgtgatattggtgtagcgatgttaaacggattaatatatgtcataggcggagttgttaaaggtgacacatgtaccgacacacttgagagtttatcagaagatggatggatgatgcatcaacgtcttccaataaatgtccaatatgtcgacgattgttcataccggcaaaatttatatatcaggaggctacacaatagtagtgtagttaatggaatatcaaatctagtccttagctataatccgatatatgatgaatggaccaaattatcatcattaaatattcctagaattaatcctgctctatggtcagtgcataataaagtatatgtaggaggaatatctgatgatattcaaactaatacatctgaaacatacaacaaagaaaaagatcgttggacattggataatagtcacgtgttaccacgcaattatataatgtataaatgcgaaccgattaaacataaatatccattggaaaaacacagtacacgaatgattttctaa

SEQ ID NO: 16020 - DNA, 12 bp, unidentified
  source 1..12: mol_type = other DNA
  misc_feature 1..12: note = Synthetic
atgtgcgaataa

SEQ ID NO: 16021 - DNA, 738 bp, unidentified
  misc_feature 1..738: note = Synthetic
  source 1..738: mol_type = other DNA
ctgacacacctggtcctgtatatttttagaatggaagacatcaattttgcgtccctggctccgcggcacggcacgcggccgttcatgggcacctggaacgagatcggcaccagccagctgaacgggggcgccttcaattggagcagtgtctggagcgggcttaaaaatttcggctcgacgctccggacctatgggaacaaggcctggaatagtagcacggggcagttgctaagggaaaagctcaaagaccagaactttcagcagaaggtggtggacgggctggcctcgggcattaacggggtggtggacatcgcgaaccaggccgtgcagcgcgagataaacagccgcctggacccgcggccgcccacggtggtggagatggaagatgcaactcttccgccgcccaaaggcgagaagcggccgcggcccgacgcggaggagacgatcctgcaggtggacgagccgccctcgtacgaggaggccgtcaaggccggcatgcccaccacgcgcatcatcgcgccgctggccacgggtgtaatgaaacccgccacccttgacctgcctccaccacccgcgcccgctccaccgaaggcagctcccgcggtcgtgcaggcccccccggtggcgaccgccgtgcgccgcgtccccgcccgccgccaggcccagaactggcagagcacgttgcacagtatcgtaggcctgggagtgaaaagtctgaagcgccgccgatgctattga

SEQ ID NO: 16022 - DNA, 120 bp, unidentified
  source 1..120: mol_type = other DNA
  misc_feature 1..120: note = Synthetic
ttgcatcttctattagaggttgttgtgaatcaactaaacttccttattacgacgttgaaaagatccacatacagtaatggctctaggtttgttcacattgcaacttgtgtctgctgttaa

SEQ ID NO: 16023 - DNA, 1005 bp, unidentified
  misc_feature 1..1005: note = Synthetic
  source 1..1005: mol_type = other DNA
aaggataaatcgattccaatcacgatgaggagaatcatcctacccacggcaccacctgaatacatggaggctgtttacccaatgagaacaatgaattctggtgcagacaacactgccagtggccctaattacacaacaactggtgtgatgacaaatgatactccctctaattcactccgaccagttgcagatgataatattgatcatccgagccacacgcctaacagtgttgcctctgcatttatattggaagctatggtgaatgtaatatctggcccgaaagtgctgatgaagcaaatcccaatctggcttcctctgggtgtctctgaccagaagacatatagctttgattcaaccactgctgccattatgctagcatcatataccatcactcattttggcaaaacctcaaatccccttgtgagaatcaaccgacttggtcctggcatacctgatcacccactacgactcctaagaataggaaatcaagccttcctacaagagtttgtgctacctcctgtacaactgccacaatacttcacttttgatctgacagcgctgaagctgatcacccagccactcccagcggcaacctggacagatgaaactccagctgtgtcaactggcacgctccgcccagggatctcattccatcccaaattaaggcctatcctgctaccaggaagagctggaaagaagggctccaactccgatctaacatctcctgacaaaatccaggctataatgaatttcctacaagacctcaaaattgtaccaatcgatccaaccaagaatatcatgggtattgaagtgccagaactcctggttcacaggctgactgggaagaagacaactaccaagaatggtcaaccaatcattccaattctgctaccaaagtacattggtcttgatcctctatctcaaggtgatctcacaatggtgatcactcaggactgtgattcctgccactccccggccagtcttcccccagtcaatgaaaaatga

SEQ ID NO: 16024 - DNA, 12 bp, unidentified
  misc_feature 1..12: note = Synthetic
  source 1..12: mol_type = other DNA
atgtgtgcttga

SEQ ID NO: 16025 - DNA, 2148 bp, unidentified
  source 1..2148: mol_type = other DNA
  misc_feature 1..2148: note = Synthetic
acgcggccctcgggctttggtgtttttggcaccttgccgcccggcgtcatgcacgccatcgctcccaggttgcttcttctttttgttctttctggtcttccggggacacgcggcgggtcgggtgtccccggaccaattaatccccccaacagcgatgttgttttcccgggaggttcccccgtggctcaatattgttatgcctatccccggttggacgatcccgggcccttgggttccgcggacgccgggcggcaagacctgccccggcgcgtcgtccgtcacgagcccctgggccgctcgttcctcacgggggggctggttttgctggcgccgccggtacgcggatttggcgcacccaacgcaacgtatgcggcccgtgtgacgtactaccggctcacccgcgcctgccgtcagcccatcctccttcggcagtatggagggtgtcgcggcggcgagccgccgtccccaaagacgtgcgggtcgtacacgtacacgtaccagggcggcgggcctccgacccggtacgctctcgtaaatgcttccctgctggtgccgatctgggaccgcgccgcggagacattcgagtaccagatcgaactcggcggcgagctgcacgtgggtctgttgtgggtagaggtgggcggggagggccccggccccaccgcccccccacaggcggcgcgtgcggagggcggcccgtgcgtccccccggtccccgcgggccgcccgtggcgctcggtgcccccggtatggtattccgcccccaaccccgggtttcgtggcctgcgtttccgggagcgctgtctgcccccacagacgcccgccgcccccagcgacctaccacgcgtcgcttttgctccccagagcctgctggtggggattacgggccgcacgtttattcggatggcacgacccacggaagacgtcggggtcctgccgccccattgggcccccggggccctagatgacggtccgtacgcccccttcccaccccgcccgcggtttcgacgcgccctgcggacagaccccgagggggtcgaccccgacgttcgggccccccgaaccgggcggcgcctcatggccttgaccgaggacacgtcctccgattcgcctacgtccgctccggagaagacgcccctccctgtgtcggccaccgccatggcaccctcagtcgacccaagcgcggaaccgaccgcccccgcaaccactactccccccgacgagatggccacacaagccgcaacggtcgccgttacgccggaggaaacggcagtcgcctccccgcccgcgactgcatccgtggagtcgtcgccactccccgccgcggcggcggcaacgcccggggccgggcacacgaacaccagcagcgcctccgcagcgaaaacgccccccaccacaccagcccccacgacccccccgcccacgtctacccacgcgaccccccgccccacgactccggggccccaaacaacccctcccggacccgcaaccccgggtccggtgggcgcctccgccgcgcccacggccgattcccccctcaccgcctcgccccccgctaccgcgccggggccctcggccgccaacgtttcggtcgccgcgaccaccgccacgcccggaacccggggcaccgcccgtacccccccaacggacccaaagacgcacccacacggacccgcggacgctccccccggctcgccagcccccccaccccccgaacatcgcggcggacccgaggagtttgagggcgccggggacggcgaaccccccgaggacgacgacagcgccaccggcctcgccttccgaactccgaaccccaacaaaccaccccccgcgcgccccgggcccatccgccccacgctcccgccaggaattcttgggccgctcgcccccaacacgcctcgcccccccgcccaagctcccgctaaggacatgccctcgggccccacaccccaacacatccccctgttctggttcctaacggcctcccctgctctagatatcctctttatcatcagcaccaccatccacacggcggcgttcgtttgtctggtcgccttggcagcacaactttggcgcggccgggcggggcgcaggcgatacgcgcacccgagcgtgcgttacgtatgtctgccacccgagcgggattag

SEQ ID NO: 16026 - DNA, 261 bp, unidentified
  source 1..261: mol_type = other DNA
  misc_feature 1..261: note = Synthetic
gtgtccccggaccaattaatccccccaacagcgatgttgttttcccgggaggttcccccgtggctcaatattgttatgcctatccccggttggacgatcccgggcccttgggttccgcggacgccgggcggcaagacctgccccggcgcgtcgtccgtcacgagcccctgggccgctcgttcctcacgggggggctggttttgctggcgccgccggtacgcggatttggcgcacccaacgcaacgtatgcggcccgtgtga

SEQ ID NO: 16027 - DNA, 39 bp, unidentified; identical to SEQ ID NO: 9495
  misc_feature 1..39: note = Synthetic
  source 1..39: mol_type = other DNA

SEQ ID NO: 16028 - DNA, 1434 bp, unidentified
  misc_feature 1..1434: note = Synthetic
  source 1..1434: mol_type = other DNA
atgtcatctttaaggaatttgctttgtcggctgatttctccgctgtgtaaacatggttcgtacagtcatttgcagttatttcttattggagatgtcagcaaatctgaaaattgcgtattatcgatgttcgtaacgaataaaaagtttttgagtaaagatttaactgataatttctaccggaagtttttaaaagtttggttaaagtgtgatctggattcaagaaatcagattaaagctatttttaataaaatgatgatgacaaaaaatttctttttgcttttggcatatttgtattttttgtacaggcaatgcaaggttctaaaaattctggctctttacaaaattcaacgtcttacttggaaacaaattgtggagagattcaaacaatacccaatacataagttaaatcagttgttggaaataccgtcgtttgtgtcttttaatgatctctattattatttatttcagcaacagttaatgttgccaatttcaactcattgtaatattccttgtatgaaactcttttgtttacgtaactttgaacaatgtaatgacatcacactgcgatacgctcatagagcaagcaacctgacatatcaagatatatttcatgggtgttctttaacagttccatgtggaaattttatctttgctatggccatggccatgatagaaaattattgttacagtttcgatcgttttttaatcccgctagaaaataataacttggtgccgattgttttgaacaaacaagaaaaacatcaacttccaaaaattctaacttttgctttgacgacagtcttgaaaagaagcttaacttcaagtatcatctctttaccggtattatgtttttgcaaaacaaagtgtctcagatatgctaaaattgatagttatctcactgtgatatgttctaaatgtggacattgtttaaattccggcaaagagaggcttaaagggaaacaaactttttctttaagctcgatgttttattatcgagatagacaggaaaaaaatattatttacagtatgcacacagatttgctttattgttcattatgtggcgggcaacgtttgacacttgaaaaagtatatgaattgtatgaatatagtgtttcaggcattcaagtaaaaagtgtatcatggaaagctataattggaactaattccgcttgcactattttaaacgatagtgttaaatttgatgccattgttgcatgttcttgcagaacttgttactctatgatccatctgcagaatctaacgataaataaactgttgaaactaatttctcactccacagaatttcaatgccaagattgtcaaaatatctacagagaaacgtgtcttgatctagaggactgtggagaaatttgtacaggctgtaaaatttctcaattagctaagtgcacgcaacatggctgcgacacgtggtga

SEQ ID NO: 16029 - DNA, 81 bp, unidentified; identical to SEQ ID NO: 9497
  misc_feature 1..81: note = Synthetic
  source 1..81: mol_type = other DNA

SEQ ID NO: 16030 - DNA, 93 bp, unidentified; identical to SEQ ID NO: 9501
  misc_feature 1..93: note = Synthetic
  source 1..93: mol_type = other DNA

SEQ ID NO: 16031 - DNA, 33 bp, unidentified; identical to SEQ ID NO: 3926
  source 1..33: mol_type = other DNA
  misc_feature 1..33: note = Synthetic

SEQ ID NO: 16032 - DNA, 36 bp, unidentified; identical to SEQ ID NO: 9502
  misc_feature 1..36: note = Synthetic
  source 1..36: mol_type = other DNA

SEQ ID NO: 16033 - DNA, 2124 bp, unidentified
  misc_feature 1..2124: note = Synthetic
  source 1..2124: mol_type = other DNA
ttgacgtacctactggtcacctccgggtcaccctcggacacgagcgagctcaaagcaaacatgctgctcagccgtcacagggagcgccttgccgccaacctgcaggagaccgccaaagacgccggagagaggtgggaactgagtgccccgacattcacgcgacactgtcccaaaacggcacggatggcgcacccttttattggcgtggtgcacagaataaactcatacagttcggtcctggaaacatactgcacacggcaccatcccgccacgcccacgtcagcaaatcccgacgtgggaacccccagaccgtccgaggacaacgtccccgcaaagccgcgcctattggagtccctatcaacatacttgcagatgcggtgtgtgcgcgaggacgcgcacgtctccacggccgatcaactggtcgagtaccaggcggccagaaaaacacacgactccctgcacgcctgctctgtctaccgcgaacttcaggcttttctggttaacctttcgtcctttctgaacggctgttacgttcccggggtgcactggctggagcccttccaacagcagctagtaatgcacacttttttctttttggtttcaatcaaggccccacaaaagacgcaccagttgtttggattgtttaagcagtacttcggtttatttgaaactccaaacagtgttttacagacgtttaagcaaaaggcaagcgtattcctaataccaaggagacacggaaagacatggatagtggtggcgatcatcagcatgctactggcatccgtagagaacattaacattgggtacgtagcccaccaaaagcacgtagccaactccgtgttcgcggaaatcataaagacgctttgtcggtggttcccccccaaaaatttaaacatcaagaaggagaacggaaccataatctacacgcgacccggaggacggtccagctcgctgatgtgcgcaacatgcttcaataagaacagcattcggggacagacctttaacctgctctacgtagacgaggcgaattttattaaaaaggatgcactgccggctattctgggtttcatgcttcagaaagacgccaagctgatatttatatcatccgtgaactcgtcagaccgctccacgagtttcctgcttaacctcaggaacgcccaggaaaagatgctgaatgtggtcagttacgtgtgtgcggaccaccgcgaagatttccacctgcaagacgcactagtgtcctgtccttgttacagactgcacattccgacgtacatcaccatcgacgaatccatcaaaaccaccaccaacctctttatggagggggcattcgacaccgaactaatgggcgagggagcagcgtcgtcaaatgctacgctttaccgcgtggtgggtgacgcagcgctgacacagtttgacatgtgtcgggtagacaccaccgcccagcaggttcagaagtgccttggaaaacagctgtttgtttacatcgaccccgcgtatacgaacaacacggaggcgtccggtactggcgtgggcgccgttgtcacgagtactcagactcccaccagaagcctcatattgggcatggagcatttcttcctgcgcgacctcactggcgcagctgcttacgagatagcgtcctgcgcatgcacgatgattaaggcgatcgctgtgctccaccccacaattgagcgcgtgaacgcggcggtcgaaggcaacagcagccaagattctggggtggccattgcaaccgtccttaacgaaatatgcccgctccccatacattttctacactatactgacaagagcagcgccctgcagtggccaatttacatgttgggaggcgagaaatcctccgcgtttgagacattcatctacgctctgaactccggcaccctgagcgccagccagacggtggtgtccaacaccatcaaaatatcatttgacccggtgacctacctggtagaacaggtccgcgcgatcaagtgcgtcccgcttagggatggagggcagtcatacagcgccaagcaaaagcacatgtcggacgacttacttgtggcagttgtcatggcccattttatggctaccgatgatagacacatgtacaagcccatatccccacaataa

SEQ ID NO: 16034 - DNA, 2124 bp, unidentified
  misc_feature 1..2124: note = Synthetic
  source 1..2124: mol_type = other DNA
ttgacgtacctactggtcacctccgggtcaccctcggacacgagcgagctcaaagcaaacatgctgctcagccgtcacagggagcgccttgccgccaacctgcaggagaccgccaaagacgccggagagaggtgggaactgagtgccccgacattcacgcgacactgtcccaaaacggcacggatggcgcacccttttattggcgtggtgcacagaataaactcatacagttcggtcctggaaacatactgcacacggcaccatcccgccacgcccacgtcagcaaatcccgacgtgggaacccccagaccgtccgaggacaacgtccccgcaaagccgcgcctattggagtccctatcaacatacttgcagatgcggtgtgtgcgcgaggacgcgcacgtctccacggccgatcaactggtcgagtaccaggcggccagaaaaacacacgactccctgcacgcctgctctgtctaccgcgaacttcaggcttttctggttaacctttcgtcctttctgaacggctgttacgttcccggggtgcactggctggagcccttccaacagcagctagtaatgcacacttttttctttttggtttcaatcaaggccccacaaaagacgcaccagttgtttggattgtttaagcagtacttcggtttatttgaaactccaaacagtgttttacagacgtttaagcaaaaggcaagcgtattcctaataccaaggagacacggaaagacatggatagtggtggcgatcatcagcatgctactggcatccgtagagaacattaacattgggtacgtagcccaccaaaagcacgtagccaactccgtgttcgcggaaatcataaagacgctttgtcggtggttcccccccaaaaatttaaacatcaagaaggagaacggaaccataatctacacgcgacccggaggacggtccagctcgctgatgtgcgcaacatgcttcaataagaacagcattcggggacagacctttaacctgctctacgtagacgaggcgaattttattaaaaaggatgcactgccggctattctgggtttcatgcttcagaaagacgccaagctgatatttatatcatccgtgaactcgtcagaccgctccacgagtttcctgcttaacctcaggaacgcccaggaaaagatgctgaatgtggtcagttacgtgtgtgcggaccaccgcgaagatttccacctgcaagacgcactagtgtcctgtccttgttacagactgcacattccgacgtacatcaccatcgacgaatccatcaaaaccaccaccaacctctttatggagggggcattcgacaccgaactaatgggcgagggagcagcgtcgtcaaatgctacgctttaccgcgtggtgggtgacgcagcgctgacacagtttgacatgtgtcgggtagacaccaccgcccagcaggttcagaagtgccttggaaaacagctgtttgtttacatcgaccccgcgtatacgaacaacacggaggcgtccggtactggcgtgggcgccgttgtcacgagtactcagactcccaccagaagcctcatattgggcatggagcatttcttcctgcgcgacctcactggcgcagctgcttacgagatagcgtcctgcgcatgcacgatgattaaggcgatcgctgtgctccaccccacaattgagcgcgtgaacgcggcggtcgaaggcaacagcagccaagattctggggtggctattgcaaccgtccttaacgaaatatgcccgctccccatacattttctacactatactgacaagagcagcgccctgcagtggccaatttacatgctgggaggcgagaaatcctccgcgtttgagacattcatctacgctctgaactccggcaccctgagcgccagccagacggtggtgtccaacaccatcaaaatatcatttgacccggtgacctacctggtagaacaggtccgcgcgatcaagtgcgtcccgcttagggatggagggcagtcatacagcgccaagcaaaagcacatgtcggacgacttacttgtggcagttgtcatggcccattttatggctaccgatgatagacacatgtacaagcccatatccccacaataa

SEQ ID NO: 16035 - DNA, 981 bp, unidentified
  misc_feature 1..981: note = Synthetic
  source 1..981: mol_type = other DNA
atgaggagggcaattctacctactgcaccgccagaatacatagaggctgtctacccaatgagaacggttagtactagtatcaacagtactgccagtggtccgaactttccagcaccggatgtaatgatgagtgatacaccctccaactcactccgaccaattgctgatgataacatcgatcatccaagtcatacaccaaccagtgtttcatcagcctttatactcgaggcaatggtgaatgtgatatcggggccgaaggtactaatgaagcaaattcctatatggctccccttgggtgttgctgatcaaaaaacatatagttttgactcaactacagctgcaattatgctcgcatcgtacaccatcactcactttggcaaaacctccaatccgcttgtgagaatcaatcgacttggtcctgggatccccgatcacccgttgcggcttctaagaataggaaatcaagccttcttgcaagagtttgtgctgcctccagttcaattgccgcagtatttcacttttgacctgacggctctaaagctgatcactcaacctctcccggcagcaacctggacggatgatactccgaccggtcctacaggaatacttcgtcctggaatttcctttcatcccaaactgagacctatcctattgccagggaagaccgggaaaagaggatccagctccgatcttacttctcctgataaaatacaagcaataatgaactttctccaagacctcaaactcgtgccgattgatccagccaagaacattatgggtattgaagtgccggaactcttggtccacagactaactggaaagaaaatcacaacaaaaaatggtcaaccaataattcctattcttctaccaaagtatattggcatggatcccatttctcagggagacctcacaatggtcatcactcaagactgtgacacttgccattctcctgctagtcttcctccagtcagcgagaaatga

SEQ ID NO: 16036 - DNA, 63 bp, unidentified; identical to SEQ ID NO: 9510
  misc_feature 1..63: note = Synthetic
  source 1..63: mol_type = other DNA

SEQ ID NO: 16037 - DNA, 1569 bp, unidentified
  source 1..1569: mol_type = other DNA
  misc_feature 1..1569: note = Synthetic
atgagtcaattgttctcaaccttcatcttttgcttgttcataggaagttccataggagacttccctctatatacaattcccgaacggcttaatccctggactccaattgacttaatccacctgagctgtcctaacaacttactgtctgatgctgaggggtgcagtgaaacttcatcctttacctatgtagagctcaaaaccggttttctcgcccatcagaaagtgccggggttcacttgcacaggtgtgataaacgaggcagtcacatacaccaactttgttggatatgttactaccacatttaagagaaaacattttaaaccaactgtttccgcatgtagggatgccttcaactggaaagtttctggagatcctagatacgaggagtctttacatacaccctatccggataacagttggctgcgaactgtcaccacaaccaaagaatccttgttaataatctctccaagcattgtagagatggatgtatacggtagaactctccattcccccatgtttcctacaggaatctgctctaagttttatccatcaattccctcatgtgctaccaatcatgattacacgttgtggttgcctgaagaccctaacttgagtttgatttgtgacatatttgtgacaagcacaggaagaaaggcaatgaatgggtctcgtatgtgtggattcacagatgaacgagggttttatcgaaccctgaagggagcatgcaagttgaccttgtgtgggaaaccaggcctacggttatatgatgggacatgggtctcgttcactaggcctgaaatccatgtatggtgctctcctgatcagctggtgaacgtgcataacaaccgcatagacgaaattgaacatttgattgtagatgacctcatcaggaagagagaggagtgtttggatacactagagaccgtcctaatgtctaagtcgttaagtttcagaaggctcagtcacttccggaagttagtccccgggtatggaaaggcctatacaatcctcaatgggagtctgatggaaaccaatgttcactataaaagggtggataattgggtcgacatactgccttccaaagggtgccttaaggtaaacaataaatgtatggagtcagacacaggggttttcttcaatggaatcattaaagggcccgatggtaggattctcatccctgaaatgcagtctggactgctaaaacaacatatggacctcttgaaggctgcagtgttccctctaagacacccattaattgacaaagcctcagtgttcaaaaaggatggtgatgcagacgacttcgtcgatgtccacatgccagacatacagaagctagtatctgatgtcgacttgggcttgccaaattggagtttctttgctttgataggtgccagtgtaattgcactgctcattctagtatgtcttctgaggatgtgctgcaaacggatgaggaggagaagctctgtcagggatcaagtagccccaccgtttagcttatcttctactccttcttctaagtcaaaggtggtgtcatcatgggagtcatataaagggacatcaagtgtctaa

SEQ ID NO: 16038 - DNA, 87 bp, unidentified; identical to SEQ ID NO: 9514
  source 1..87: mol_type = other DNA
  misc_feature 1..87: note = Synthetic

SEQ ID NO: 16039 - DNA, 45 bp, unidentified; identical to SEQ ID NO: 9515
  source 1..45: mol_type = other DNA
  misc_feature 1..45: note = Synthetic

SEQ ID NO: 16040 - DNA, 15 bp, unidentified
  misc_feature 1..15: note = Synthetic
  source 1..15: mol_type = other DNA
gtggctttaccttaa

SEQ ID NO: 16041 - DNA, 186 bp, unidentified
  source 1..186: mol_type = other DNA
  misc_feature 1..186: note = Synthetic
atttgttgtgtagcatcacctgagctgcttcctgatagcgaactgacagagcttatatgcaatgatttggatgactttgtacaactaatgctacgcatggagattcgggatcggggttttgagcctaatgttaatcttttaaatgaactgcaggtgacacgggaacctgatctttttcaaccatga

SEQ ID NO: 16042 - DNA, 138 bp, unidentified
  source 1..138: mol_type = other DNA
  misc_feature 1..138: note = Synthetic
atgtactcaaaaaggatattgataacgtacgtcgaggtttcgcggacgcgttcaacccgaggctggcaaaactcctgtcgccgttatcccacgtggatgttcaaagggctgtacgcatatcaatgtcgtttgaagtaa

SEQ ID NO: 16043 - DNA, 81 bp, unidentified; identical to SEQ ID NO: 9526
  source 1..81: mol_type = other DNA
  misc_feature 1..81: note = Synthetic

SEQ ID NO: 16044 - DNA, 1743 bp, unidentified
  misc_feature 1..1743: note = Synthetic
  source 1..1743: mol_type = other DNA
atggcagaaggcggttttggagcggactcggtggggcgcggcggagaaaaggcctctgtgactaggggaggcaggtgggacttggggagctcggacgacgaatcaagcacctccacaaccagcacggatatggacgacctccctgaggagaggaaaccactaacgggaaagtctgtaaaaacctcgtacatatacgacgtgcccaccgtcccgaccagcaagccgtggcatttaatgcacgacaactccctctacgcaacgcctaggtttccgcccagacctctcatacggcacccttccgaaaaaggcagcatttttgccagtcggttgtcagcgactgacgacgactcgggagactacgcgccaatggatcgcttcgccttccagagccccagggtgtgtggtcgccctccccttccgcctccaaatcacccacctccggcaactaggccggcagacgcgtcaatgggggacgtgggctgggcggatctgcagggactcaagaggaccccaaagggatttttaaaaacatctaccaaggggggcagtctcaaagcccgtggacgcgatgtaggtgaccgtctcagggacggcggctttgcctttagtcctaggggcgtgaaatctgccatagggcaaaacattaaatcatggttggggatcggagaatcatcggcgactgctgttcccgtcaccacgcagcttatggtaccggtgcacctcattagaacgcctgtgaccgtggactacaggaatgtttatttgctttacttagagggggtaatgggtgtgggcaaatcaacgctggtcaacgccgtgtgcgggatcttgccccaggagagagtgacaagttttcccgagcccatggtgtactggacgagggcatttacagattgttacaaggaaatttcccacctgatgaagtctggtaaggcgggagacccgctgacgtctgccaaaatatactcatgccaaaacaagttttcgctccccttccggacgaacgccaccgctatcctgcgaatgatgcagccctggaacgttgggggtgggtctgggaggggcactcactggtgcgtctttgataggcatctcctctccccagcagtggtgttccctctcatgcacctgaagcacggccgcctatcttttgatcacttctttcaattactttccatctttagagccacagaaggcgacgtggtcgccattctcaccctctccagcgccgagtcgttgcggcgggtcagggcgaggggaagaaagaacgacgggacggtggagcaaaactacatcagagaattggcgtgggcttatcacgccgtgtactgttcatggatcatgttgcagtacatcactgtggagcagatggtacaactatgcgtacaaaccacaaatattccggaaatctgcttccgcagcgtgcgcctggcacacaaggaggaaactttgaaaaaccttcacgagcagagcatgctacctatgatcaccggtgtactggatcccgtgagacatcatcccgtcgtgatcgagctttgcttttgtttcttcacagagctgagaaaattacaatttatcgtagccgacgcggataagttccacgacgacgtatgcggcctgtggaccgaaatctacaggcagatcctgtccaatccggctattaaacccagggccatcaactggccagcattagagagccagtctaaagcagttaatcacctagaggagacatgcagggtctag

SEQ ID NO: 16045 - DNA, 1743 bp, unidentified
  misc_feature 1..1743: note = Synthetic
  source 1..1743: mol_type = other DNA
atggcagaaggcggttttggagcggactcggtggggcgcggcggagaaaaggcctctgtgactaggggaggcaggtgggacttggggagctcggacgacgaatcaagcacctccacaaccagcacggatatggacgacctccctgaggagaggaaaccactaacgggaaagtctgtaaaaacctcgtacatatacgacgtgcccaccgtcccgaccagcaagccgtggcatttaatgcacgacaactctctctacgcaacgcctaggtttccgcccagacctctcatacggcacccttccgaaaaaggcagcatttttgccagtcggttgtcagcgactgacgacgactcgggagactacgcgccaatggatcgcttcgccttccagagccccagggtgtgtggtcgccctccccttccgcctccaaatcacccacctccggcaactaggccggcagacgcgtcaatgggggacgtgggctgggcggatctgcagggactcaagaggaccccaaagggatttttaaaaacatctaccaaggggggcagtctcaaagcccgtggacgcgatgtaggtgaccgtctcagggacggcggctttgcctttagtcccaggggcgtgaaatctgccatagggcaaaacattaaatcatggttggggatcggagaatcatcggcgactgctgtccccgtcaccacgcagcttatggtaccggtgcacctcattagaacgcctgtgaccgtggactacaggaatgtttatttgctttacttagagggggtaatgggtgtgggcaaatcaacgctggtcaacgccgtgtgcgggatcttgccccaggagagagtgacaagttttcccgagcccatggtgtactggacgagggcatttacagattgttacaaggaaatttcccacctgatgaagtctggtaaggcgggagacccgctgacgtctgccaaaatatactcatgccaaaacaagttttcgctccccttccggacgaacgccaccgctatcctgcgaatgatgcagccctggaacgttgggggtgggtctgggaggggcactcactggtgcgtctttgataggcatctcctctccccagcagtggtgttccctctcatgcacctgaagcacggccgcctatcttttgatcacttctttcaattactttccatctttagagccacagaaggcgacgtggtcgccattctcaccctctccagcgccgagtcgttgcggcgggtcagggcgaggggaagaaagaacgacgggacggtggagcaaaactacatcagagaattggcgtgggcttatcacgccgtgtactgttcatggatcatgttgcagtacatcactgtggagcagatggtacaactatgcgtacaaaccacaaatattccggaaatctgcttccgcagcgtgcgcctggcacacaaggaggaaactttgaaaaaccttcacgagcagagcatgctacctatgatcaccggtgtactggatcccgtgagacatcatcccgtcgtgatcgagctttgcttttgtttcttcacagagctgagaaaattacaatttatcgtagccgacgcggataagttccacgacgacgtatgcggcctgtggaccgaaatctacaggcagatcctgtccaatccggctattaaacccagggccatcaactggccagcattagagagccagtctaaagcagttaatcacctagaggagacatgcagggtctag

SEQ ID NO: 16046 - DNA, 501 bp, unidentified
  misc_feature 1..501: note = Synthetic
  source 1..501: mol_type = other DNA
atggggcccatactagtcttgcttgttttactttcgcttttggaaccgggttctgccaattacgatccatgtctagacttcgacccagaaaactgcacacttacttttgcacccgacacaagccgcatctgtggagttcttattaagtgcggatgggaatgcaggtccgttgaaattacacacaataacaaaacctggaacaataccttatccaccacatgggagccaggagttcccgagtggtacactgtctctgtccgaggtcctgacggttccatccgcattagtaacaacactttcattttttctgaaatgtgcgatctggccatgttcatgagcaaacagtattctctatggcctcctagcaaggacaacatcgtaacgttctccattgcttattgcttgtgcgcttgccttcttactgctttactgtgcgtatgcatacacctgcttgtaaccactcgcatcaaaaacgccaataacaaagaaaaaatgccttaa

SEQ ID NO: 16047 - DNA, 57 bp, unidentified; identical to SEQ ID NO: 9535
  misc_feature 1..57: note = Synthetic
  source 1..57: mol_type = other DNA

SEQ ID NO: 16048 - DNA, 525 bp, unidentified
  source 1..525: mol_type = other DNA
  misc_feature 1..525: note = Synthetic
atggggaagatcaccctagtgtgcggtgtgctggtggcggtactttcgattttgggtctgggcagcgcggctgtagtgacggagaaggccgatccctgcttgacttttaaccccgacaaatgccagctgagttttcagccagatggcaatcggtgcgcggtgttgattaagtgcggatgggaatgccagagcgtggcgatccagtataaaaacaagacgcggaacaatactctcgcgtccacatggcagcccggggaccccgagtggtacaccgtctctgtccctggtgctgacggcttccttcgcacggtaaacaacacttttatttttgagcacatgtgcaataccgccatgttcatgagcaggcagtaccatatgtggcccccacggaaagagaatatcgtggtcttctccatcgcttacagcttgtgcacggtgctaatcaccgcgatcgtgtgcctgagcattcacatgctcatcgctattcgccccagaaataatgctgagaaagagaaacagccataa

SEQ ID NO: 16049 - DNA, 1005 bp, unidentified
  misc_feature 1..1005: note = Synthetic
  source 1..1005: mol_type = other DNA
atggctagccggaggcgcaaacttcggaatttcctaaacaaggaatgcatatggactgttaacccaatgtcaggggaccatatcaaggtctttaacgcctgcacctctatctcgccggtgtatgaccctgagctggtaaccagctacgcactgagcgtgcctgcttacaatgtgtctgtggctatcttgctgcataaagtcatgggaccgtgtgtggctgtgggaattaacggagaaatgatcatgtacgtcgtaagccagtgtgtttctgtgcggcccgtcccggggcgcgatggtatggcgctcatctactttggacagtttctggaggaagcatccggactgagatttccctacattgctccgccgccgtcgcgcgaacacgtacctgacctgaccagacaagaattagttcatacctcccaggtggtgcgccgcggcgacctgaccaattgcactatgggtctcgaattcaggaatgtgaacccttttgtttggctcgggggcggatcggtgtggctgctgttcttgggcgtggactacatggcgttctgtccgggtgtcgacggaatgccgtcgttggcaagagtggccgccctgcttaccaggtgcgaccacccagactgtgtccactgccatggactccgtggacacgttaatgtatttcgtgggtactgttctgcgcagtcgccgggtctatctaacatctgtccctgtatcaaatcatgtgggaccgggaatggagtgactagggtcactggaaacagaaattttctgggtcttctgttcgatcccattgtccagagcagggtaacagctctgaagataactagccacccaacccccacgcacgtcgagaatgtgctaacaggagtgctcgacgacggcaccttggtgccgtcgtccaaggcaccctgggtcctcttacgaatgtctgactacttcagccgcttgctgatatatgagtgtaaaaaacttaaggccctgggcttacgttcttattga

SEQ ID NO: 16050 - DNA, 1005 bp, unidentified
  misc_feature 1..1005: note = Synthetic
  source 1..1005: mol_type = other DNA
atggctagccggaggcgcaaacttcggaatttcctaaacaaggaatgcatatggactgttaacccaatgtcaggggaccatatcaaggtctttaacgcctgcacctctatctcgccggtgtatgaccctgagctggtaaccagctacgcactgagcgtgcctgcttacaatgtgtctgtggctatcttgctgcataaagtcatgggaccgtgtgtggctgtgggaattaacggagaaatgatcatgtacgtcgtaagccagtgtgtttctgtgcggcccgtcccggggcgcgatggtatggcgctcatctactttggacggtttctggaggaagcatccggactgagatttccctacattgctccgccgccgtcgcgcgaacacgtacctgacctgaccagacaagaattagttcatacctcccaggtggtgcgccgcggcgacctgaccaattgcactatgggtctcgaattcaggaatgtgaacccttttgtttggctcgggggcggatcggtgtggctgctgttcttgggcgtggactacatggcgttctgtccgggtgtcgacggaatgccgtcgttggcaagagtggccgccctgcttaccaggtgcgaccacccagactgtgtccactgccatggactccgtggacacgttaatgtatttcgtgggtactgttctgcgcagtcgccgggtctatctaacatctgtccctgtatcaaatcatgtgggaccgggaatggagtgactagggtcactggaaacagaaattttctgggtcttctgttcgatcccattgtccagagcagggtaacagctctgaagataactagccacccaacccccacgcacgtcgagaatgtgctaacaggagtgctcgacgacggcaccttggtgccgtcgtccaaggcaccctgggtcctcttacgaatgtctgactacttcagccgcttgctgatatatgagtgtaaaaaacttaaggccctgggcttacgttcttattga

SEQ ID NO: 16051 - DNA, 243 bp, unidentified
  source 1..243: mol_type = other DNA
  misc_feature 1..243: note = Synthetic
atgcaacaagcttacataggggctacgctggttagcatagctccgagtatgcgtgtcataatcagtgtgggttcttttgtcatggttcctggcggggaagtggccgcgctggtccgtgcagacctgcacgattatgttcagctggccctgcgaagggacctacgggatcgcggtatttttgttaatgttccgcttttgaatcttatacaggtctgtgaggaacctgaatttttgcaatcatga

SEQ ID NO: 16052 - DNA, 222 bp, unidentified
  misc_feature 1..222: note = Synthetic
  source 1..222: mol_type = other DNA
attcaagattgcagcttaatgtttgaagattttgaggaaaatgcttttgctatgtttgtgtttcttgaagtgcgtgtgccagccttagtggaagccgtgattggtaatttggaaaatcgcatcttttttgacttggctgtaatttttcaccaacgcagcggtggggagaggtgtgatcttcgtgacttgcactttggctcgctttacaaccgtctggaataa

SEQ ID NO: 16053 - DNA, 1626 bp, unidentified
  source 1..1626: mol_type = other DNA
  misc_feature 1..1626: note = Synthetic
ttggcggccgaatctccgcgcaacatgatggcggcggcggtggtgcgagcggaggttaggcggcagcggcgagaggagaggaaaaagatggcgtccgcgaggacgacggaggatccacctgaaaaccacgttgtcgcggacgtggcttgtgggacgggcgccgtcactcgttcgtcttcgtcgtccctagtggtgtcgtcttcctcggcgtcaggctcagacgaatcttcctccgcctctcctctcagtttccccgtctcctctccctcaactgccgtcaggtctccggggtccgccggggtttcgacgtccctgtgctcggtggaacggatggtcgagctgtcggcgcagtctccggccgccgatttctcggtctccgaggcttggcgcttcgaggaggccgtaaatatggcgctggtggcctgcgaggccgtgtcaccttacgatcgctttcgtctaattgaaacgcccgacgagaatttcttgttggtcaccaacgtaattccgcgcgagtcggccgaggtgccggtgttggatagcagtagcagtggtggcgatagcgggccggaggacaaaaagaaaaacgtcgggaataaaaccgcgggggaaaagaacggcggtgggtctcgggccaaacgccgtcgtagacgacgcgctccgaaaaacgacgccgccacgccgtcttttctacgtcgacacgacgtgctggagcgtttcgcggccgcggctgagcctttgccgtcgctttgtgtgcatgattatgcgttacgcaatgctgaccgtgttacctacgacggcgaattaatctacggcagttacctgttgtatcgcaaggctcacgtggagctgtcactctccagcaacaaggtgcaacacgtggaagccgtgctgcgacaggtgtacacgccgggcttgttagatcatcacaacgtgtgcgacgtggaggccctgttgtggctgctgtactgtggaccgcgcagcttttgcgcgcgtgacacctgtttcggtcgcgaaaagaacggttgtcctttccccgcgttgttgcccaaactcttttacgaacccgtgcgggactatatgacctacatgaatctggctgagctgtacgtctttgtttggtatcgcggctacgaattccctgcgccaacgccgcaggcgacgacggcgggtggtggtggtggtggtggtagtggtggcggcggcggggccggcgcttgtgcggtcgagacgagcgcgtcagcaggccgggtcgatgacgccggcgacgaggtgcatttgcctttaaagcccgtctcgctggaccgtctcagagaggtgttacaggcggtgcgcggccgcttctcggggcgcgaggtgcccgcctggccggcctcgtcgcgcacctgtttgttgtgcgcgctctacagtcagaaccgtctctgtttagatctcgcgcgtgacgaggcgcggaccgtgagttatagccccatcgtcatccaagactgcgccgcggctgttaccgacgtcactttgagccacatcttgcccggccagagcaccgtctcgcttttccccgtctaccacgtcggcaagttgctggacgctctctcgctgaacgacgcgggtctcatcacgttgaatctatga

SEQ ID NO: 16054 - DNA, 33 bp, unidentified; identical to SEQ ID NO: 9551
  source 1..33: mol_type = other DNA
  misc_feature 1..33: note = Synthetic

SEQ ID NO: 16055 - DNA, 342 bp, unidentified
  source 1..342: mol_type = other DNA
  misc_feature 1..342: note = Synthetic
acgccaagaggacgagctgctaacaacatgaggggcggagacgtcttcgcgagcgttgtcttgatgctgttacttgcactaccgcgaccgggagtgtcactcgcgagacggaaatgttgtttgaatcccacaaatcgtccgatcccgaatcctttactgcaagatctatcacgcgtcgactatcaggcgataggacatgactgcggacgggaagctttcagagtgacgctgcaagacggaagacaaggctgcgttagcgttggtaacaagagcttactagactggcttcggggacacaaggatctctgccctcagatatggtccgggtgcgagtctctgtaa

SEQ ID NO: 16056 - DNA, 93 bp, unidentified
  source 1..93: mol_type = other DNA
  misc_feature 1..93: note = Synthetic
acggaaatgttgtttgaatcccacaaatcgtccgatcccgaatcctttactgcaagatctatcacgcgtcgactatcaggcgataggacatga

SEQ ID NO: 16057 - DNA, 33 bp, unidentified; identical to SEQ ID NO: 9555
  source 1..33: mol_type = other DNA
  misc_feature 1..33: note = Synthetic

SEQ ID NO: 16058 - DNA, 477 bp, unidentified
  misc_feature 1..477: note = Synthetic
  source 1..477: mol_type = other DNA
atgaggagtattgcggggctagataaattaaaaatggaaatttttaatgtagaagaattgataaatatgaaaccttttaagaatatgaataaaataacaattaatcaaaaggataattgtatattagcaaatcgatgctttgttaaaatagatactcctagatacataccatcgacatccattagcagttctaatatcatcagaatacggaatcatgattttacattatctgaattattgtattcaccgtttcattttcaacagcctcagtttcaatatctccttcctgggtttgtattaacgtgtattgataaagtttcgaaacagcaaaaagaatgtaaatattgtatctctaatcgtggagatgatgatagtttaagcattaatatatttattccgactattaacaagtctatatatattattatcggtttacggatgaaaaatttttggaagcctaaattcgaaatagaataa

SEQ ID NO: 16059 - DNA, 444 bp, unidentified
  misc_feature 1..444: note = Synthetic
  source 1..444: mol_type = other DNA
atggaaattgttaatgtagaagaattgataaatatgaaaccttttaagaatatgaataaaataacaattaatcaaaaggataattgtatattagcaaatcgatgctttgttaaaatagatacacctagatacgttccatctgcatccattaacagttctaatactatcagaatacggaatcatgattttacattatctgaactattgtattcaccgtttcattttcaacagcctcagtttcaatatctccttcctgggtttgtattaacgtgtattgataaagtttcgaaacagcaaaaagaatgtaagtattgtatctctaatcgtggtgatgacgatagtttaagcattaatctgtttattccgaccattaacaagtctatatatattattatcggtttacggatgaaaaatttttggaagcctaaattcgaaatagaataa

SEQ ID NO: 16060 - DNA, 24 bp, unidentified
  misc_feature 1..24: note = Synthetic
  source 1..24: mol_type = other DNA
ctgtttgtcaatctgtattcgtaa

SEQ ID NO: 16061 - DNA, 615 bp, unidentified
  misc_feature 1..615: note = Synthetic
  source 1..615: mol_type = other DNA
atggcgtatatgaacagatcagatctcgataaactaaaacacgaaaatatcttttctgggaatattatagaggacgccaaagagttcgtctttggatctagaaaaatatatactgattctgttgatgatctaatagaattatatagtttagccaaatatcttaacaacgaaaatcttaaagatgtagtgattgagagaatggattatgtgtgcaaatatatcggtaaagataattggagtactatatattcgttttataaagaaaatggtctacgtaatagttttctacgacaatacatcaacaataatatagaagagatatgtaacacagaccaatttctaaaattggatgtagattcagtatgtgatattctagacaacgatgagatcgtagtaactagagaatatactatcttaaacatggtattacgatggctagaaaataaaagagttaatatagacgactttactaaagtcatgttcgttattcgatttaaatttataacatattctgaacttactaatgcgataaagaaaatagctccagaatacagacaatgcttacaggatctataccatatgaaaattacgcgtcctagacactttgataactag

SEQ ID NO: 16062 - DNA, 45 bp, unidentified; identical to SEQ ID NO: 9571
  source 1..45: mol_type = other DNA
  misc_feature 1..45: note = Synthetic

SEQ ID NO: 16063 - DNA, 45 bp, unidentified; identical to SEQ ID NO: 9571
  misc_feature 1..45: note = Synthetic
  source 1..45: mol_type = other DNA

SEQ ID NO: 16064 - DNA, 45 bp, unidentified; identical to SEQ ID NO: 9571
  misc_feature 1..45: note = Synthetic
  source 1..45: mol_type = other DNA

SEQ ID NO: 16065 - DNA, 33 bp, unidentified; identical to SEQ ID NO: 9572
  misc_feature 1..33: note = Synthetic
  source 1..33: mol_type = other DNA

SEQ ID NO: 16066 - DNA, 123 bp, unidentified
  misc_feature 1..123: note = Synthetic
  source 1..123: mol_type = other DNA
acgtggcctttacagcacatacaaaaagaaccagtatcagagaaaataatcaatctaacaaacttgatgtttggacaagaaccgttacctaaaaaagaatctctcaaacagcaatgtttgtga

SEQ ID NO: 16067 - DNA, 10086 bp, unidentified; identical to SEQ ID NO: 11291
  misc_feature 1..10086: note = Synthetic
  source 1..10086: mol_type = other DNA

SEQ ID NO: 16068 - DNA, 4131 bp, unidentified; identical to SEQ ID NO: 11292
  source 1..4131: mol_type = other DNA
  misc_feature 1..4131: note = Synthetic

SEQ ID NO: 16069 - DNA, 507 bp, unidentified
  source 1..507: mol_type = other DNA
  misc_feature 1..507: note = Synthetic
atggatctgctaggagacctaagagaatttggcgtggttcggcgcttgctggagttggcctctgacagaacttccaagttttggaggttttgttttggctcaacgcttagcaacgtgctatatagggtcaagaaggagcaggagacgcagtttgctaggctgttggccgatactcctggagtttttgtggctctggatctaggccatcactctcttttccaagagaaaattatcaaaaacctaacttttacgtctcctggtcgcacggttgcttccgctgcctttattacctatattttggatcaatggagcaacagcgacagccacctgtcgtgggagtacatgctggattacatggcgatggctctgtggagggccatgctgcggaggagggtttgcatttacttgcgggcgcagcctccgcggctggaccgagtggtggaggagaacgagccggaggagaccgagaatctgagagccggcctggaccctccagtggaagactag

SEQ ID NO: 16070 - DNA, 45 bp, unidentified; identical to SEQ ID NO: 9571
  misc_feature 1..45: note = Synthetic
  source 1..45: mol_type = other DNA

SEQ ID NO: 16071 - DNA, 558 bp, unidentified
  source 1..558: mol_type = other DNA
  misc_feature 1..558: note = Synthetic
atgacaaaattaaaaaagataaagagttctaattccagcaattctagtaaatcaaccgatagcgaatcagactgggaggatcactgtagcgccatggaacaaaataatgacgtagataatatttctaggaatgagatattggacgatgatagctttgctggtagtttaatatgggataacgaatccaatgttgtggcgcctagtacagaacacatttacgatagtgttgctggaagcacgctgctaataaataatgatcgtaatgaacagactatttatcagaacactacagtagtaattaatgagacggagactgaagtacttaatgaagataccaaacagaatcctagctattcttccaatcctttcgtaaattataataaaaccagtatttgtagcaagtcaaatccgttcattacagaactcaacaataaatttagtgagaataatccgtttaggagagcacatagcgatgattatctaaataagcaagaacaagatcgtgatcaagatcataaacatgattatatagaatcatcggttgtatcattggtctga

SEQ ID NO: 16072 - DNA, 21 bp, unidentified
  misc_feature 1..21: note = Synthetic
  source 1..21: mol_type = other DNA
ttgaaaatactaattgtttaa

SEQ ID NO: 16073 - DNA, 21 bp, unidentified
  misc_feature 1..21: note = Synthetic
  source 1..21: mol_type = other DNA
atcctgccagaactgttttag

SEQ ID NO: 16074 - DNA, 21 bp, unidentified
  misc_feature 1..21: note = Synthetic
  source 1..21: mol_type = other DNA
ttgaaaatactaattgtttaa

SEQ ID NO: 16075 - DNA, 21 bp, unidentified
  source 1..21: mol_type = other DNA
  misc_feature 1..21: note = Synthetic
atcctgccagaactgttttag

SEQ ID NO: 16076 - DNA, 2517 bp, unidentified
  misc_feature 1..2517: note = Synthetic
  source 1..2517: mol_type = other DNA
atgggccccggtctgtgggtggtgatgggggtcctggtgggcgttgccgggggccatgacacgtactggacggagcaaatcgacccgtggtttttgcacggtctggggttggcccgcacgtactggcgcgacacaaacaccgggcgtctgtggttgcccaacacccccgacgccagcgacccccagcgcggacgcttggcgcccccgggcgaactcaacctgactacggcatccgtgcccatgcttcggtggtacgccgagcgcttttgtttcgtgttggtcaccacggccgagtttcctcgggaccccgggcagctgctttacatcccaaagacctatctgctcggccggcctcggaacgcgagcctgcccgagctccccgaggcggggcccacgtcccgtccccccgccgaggtgacccagctcaagggactgtcgcacaaccccggcgcctccgcgctgttgcggtcccgggcctgggtaacattcgcggccgcgccggaccgcgaggggcttacgttcccgcggggagacgacggggcgaccgagaggcacccggacggccgacgcaacgcgccgcccccggggccgcccgcggggacaccgaggcatccgacgacgaacctgagcatcgcgcatctgcacaacgcatccgtgacctggctggccgccaggggcctgctacggactccgggtcggtacgtgtacctctccccgtcggcctcgacgtggcccgtgggcgtctggacgacgggcgggctggcgttcgggtgcgacgccgcgctcgtgcgcgcgcgatacgggaagggcttcatggggctcgtgatatcgatgcgggacagccctccggccgagatcatagtggtgcctgcggacaagaccctcgctcgggtcggaaatccgaccgacgaaaacgcccccgcggtgctccccgggcctccggccggccccaggtatcgcgtctttgtcctgggggccccgacgcccgccgacaacggctcggcgctggacgccctccggcgggtggccggctaccccgaggagagcacgaactacgcccagtatatgtcgcgggcctatgcggagtttttgggggaggacccgggctccggcacggacgcgcgtccgtccctgttctggcgcctcgcggggctgctcgcctcgtcggggtttgcgttcgtcaacgcggcccacgcccacgacgcgattcgcctctccgacctgctgggctttttggcccactcgcgcgtgctggccggcctggccgcccggggagcagcgggctgcgcggccgactcggtgttcctgaacgtgtccgtgttggacccggcggcccgcctgcggctggaggcgcgcctcgggcatctggtggccgcgatcctcgagcgagagcagagcctggcggcgcacgcgctgggctatcagctggcgttcgtgttggacagccccgcggcctatggcgcggtggccccgagcgcggcccgcctgatcgacgccctgtacgccgagtttctcggcggccgcgcgctaaccgccccgatggtccgccgagcgctgttttacgccacggccgtcctccgggcgccgttcctggcgggcgcgccctcggccgagcagcgggaacgcgcccgccggggcctcctcataaccacggccctgtgtacgtccgacgtcgccgcggcgacccacgccgatctccgggccgcgctagccaggaccgaccaccagaaaaacctcttctggctcccggaccacttttccccatgcgcagcttccctgcgcttcgatctcgccgagggcgggttcatcctggacgcgctggccatggccacccgatccgacatcccggcggacgtcatggcacaacagacccgcggcgtggcctccgttctcacgcgctgggcgcactacaacgccctgatccgcgccttcgtcccggaggccacccaccagtgtagcggcccgtcgcacaacgcggagccccggatcctcgtgcccatcacccacaacgccagctacgtcgtcacccacacccccttgccccgcgggatcggatacaagcttacgggcgttgacgtccgccgcccgctgtttatcacctatctcaccgccacctgcgaagggcacgcgcgggagattgagccgaagcggctggtgcgcaccgaaaaccggcgcgacctcggcctcgtgggggccgtgtttctgcgctacaccccggccggggaggtcatgtcggtgctgctggtggacacggatgccacccaacagcagctggcccaggggccggtggcgggcaccccgaacgtgttttccagcgacgtgccgtccgtggccctgttgttgttccccaacggaactgtgattcatctgctggcctttgacacgctgcccatcgccaccatcgcccccgggtttctggccgcgtccgcgctgggggtcgttatgattaccgcggccctggcgggcatccttagggtggtccgaacgtgcgtcccatttttgtggagacgcgaataa

SEQ ID NO: 16077 - DNA, 21 bp, unidentified
  misc_feature 1..21: note = Synthetic
  source 1..21: mol_type = other DNA
atcctgccagaactgttttag

SEQ ID NO: 16078 - DNA, 774 bp, unidentified
  misc_feature 1..774: note = Synthetic
  source 1..774: mol_type = other DNA
atggactctgacgctcctggtcctgtgatgtgtttttgtagacagatggaagacatcaatttttcgtccctggctccgcgacacggcacgcggccgtttatgggcacctggagcgacatcggcaccagccaactgaacgggggcgccttcaattggagcagtctctggagcgggcttaagaattttgggtccacgcttaaaacctatggcagcaaggcgtggaacagcaccacagggcaggcgctgagagataagctgaaagagcagaacttccagcagaaggtagtcgatggcctcgcctcaggcatcaacggggtggtggacctggccaatcaggccgtgcagcggcagatcaacagccgcctggacccggttccccccgccggctccgtggagatgccgcaggtggaggaggagctgcctcccctggacaagcggggcgacaagcgtccccgtcccgacgcggaggagacgctgctgacgcacacggacgaaccgcccccgtacgaggaggcggtgaaactgggcctgcccaccacgcgtcccattgcgcctctagctaccggggtgctgaaacccgagagtagtaagcccgcgaccttggacttgcctcctccgcccactccccgcccctccacagtggctaagcccctgccgccggtggccgtggcccgcgcgcgaccgggggctcgccctcaggcgaactggcagagcactctgaacagcatcgtgggtctgggagtgcagagtgtgaagcgccgccgctgttattaa

SEQ ID NO: 16079 - DNA, 1065 bp, unidentified
  source 1..1065: mol_type = other DNA
  misc_feature 1..1065: note = Synthetic
atgatgaagatgacgatgaaaatgatggtacatatatattttgtatcattattgttattgctattccacagttacgccatagacattgaaaatgaaatcacagatttcttcaataaaatgaaagatactctaccagctaaagactctaaatggttgaatccaacatgtatatttggaggcacaatgaataatatggctgctataggagagccattcagtgcaaagtgtcctcctattgaagacagtcttttatcgcgtagatatataaataaagacaacgtagttaactgggagaaaataggaaaaactagacgacctcttaatagacgtgttaaaaacggtgacttatggatagccaactatacatctaacgacagtcatcgtatgtatttgtgtacagtgattacaaagaatggcgactgtattcaaggtatagttagatcccatgtacggaaaccttcttcatgcattccagaaatctatgaactaggtactcatgataagtatggaatagacttatactgtggaattatttacgcaaaacattataataatataacttggtataaagataataaggaaattaatatcgatgatattaagtattcacaaacgggaaaggaattaattattcataatccagcattagaagatagcggaagatatgactgttatgttcattacgacgacgttagaatcaagaatgatatcgtagtatcaagatgtaaaatacttacggttataccgtcacaagaccacaggtttaaactaatactagattcgaaaatcaacgtaattataggagaacctgccaatataacatgcactgctgtatcaacgtcattattgttcgatgatgtactgattgaatgggaaaatccatccggatggcttataggattcgattttgatgtatactctgttttaactagtagaggcggtattactgaggcgaccttgtattttaaaaatgttactgaagaatatataggtaatacatataaatgtcgtggacacaactattattttgaaaaaacccttacaactacagtagtattggagtaa

SEQ ID NO: 16080 - DNA, 36 bp, unidentified; identical to SEQ ID NO: 9587
  source 1..36: mol_type = other DNA
  misc_feature 1..36: note = Synthetic

SEQ ID NO: 16081 - DNA, 1593 bp, unidentified
  misc_feature 1..1593: note = Synthetic
  source 1..1593: mol_type = other DNA
atgagtgaaaaaggatttccaacgtttgtaaacgccgccgccatgctctcgcgggagtccgtcgtggctccgcacgcggacctgctcttccgctacctggagtccgggcaggtggatctcgccacggtccgcgcgctcgtggcaactgacgcggacgtgaacttccgcggcgagtacgggcgcacgccgctgcacctctgcgtgcacttcgcgcggcacgagcagtgtgcggagatcgtgcgcgtgctgctggaggctggcgcggacgtaaacgccaaggacacctgcggcttcacgccgctgcacgcctacgtgcagcacgactgcgtgcggccggaggtggtcgcgctcatgctggaggcgggcgcagacgtggtctgcgacgacagcttcgtcttctacgacagcgcgctctcctccttcctgtcttcctgcggctccgacggcaccgagctcgaggtcgcgcggctgctgctggacgcgggcgcgcgcgtgaacgagggcgacacctacggcatgacgccgctgcacgtgtacgccaagaaccagtggatccgcgaggacgtgctgcggctgctgctcgagcgcggcgcgaacccaaacgcctgcgactgccacggcgtgacgccgctggcggcgctgctgggctccggcggcgtctccgccgcgctcgtggacgtgatgctgcgcgcgggcgcagacgcacgcgccgtggacgcatacaggcgcacgacactgcaccacctcgcgcgcacggccaagatctccgagggcctggtgcgcatgctcacgggcctgggcgtggacccggccgcggtagacgcgagtgggaacaccatgctgcactacatggcgacctacgggcgctgcgctcgcggcgtcgtggaattcgtgctcgagcgcgggctggacctgaacctgcgcaacaacaacctgcagaccgcgctgcaccgcgcggcggtgttcagccacggcgcctgctgccggctggtgcgcatgggcgcggagctcgggcacgtggcggcctcgggcctatgcgcggtctctgagatgctgcgccgcaacaacgtgcgtgcgacggccgccgtgctcgcgcgccggccgccgacggaactgctcgtgcgcgcgctgctcacatccgagcgctggggccacgtgttcaaacgctcggaggccgcgctgctgtgcgtgcaggagctggcgctgcgcggcgagggcgcgcgcctgctggcggagcgagcgctggcggactacgcgaccgtggtccgcgcgtgcgagcaggagatcgcgagcatgcgcgcggtgcgctgccacacggacgcgacgctgctggacgtgctgcgcgcggcgcacgacgcgaaggcgctcttcgtgtcgaacgccttcctggagcgcgcggccgagttccccatctacgggacggcgctcttcggcaaggtctgcatgatgcggctgcgcgtctcgctggctgagcagatcgccggcctcatgtgcccgtgcgccctgccgccggagatcgtgacctccatcctgtgcttcctgccgtacgagtcgctgctggacctgcgccgcgccatgctgacccgcccctga

SEQ ID NO: 16082 - DNA, 39 bp, unidentified; identical to SEQ ID NO: 9591
  source 1..39: mol_type = other DNA
  misc_feature 1..39: note = Synthetic

SEQ ID NO: 16083 - DNA, 57 bp, unidentified; identical to SEQ ID NO: 9592
  misc_feature 1..57: note = Synthetic
  source 1..57: mol_type = other DNA

SEQ ID NO: 16084 - DNA, 15 bp, unidentified
  source 1..15: mol_type = other DNA
  misc_feature 1..15: note = Synthetic
atggcaagtgtttga

SEQ ID NO: 16085 - DNA, 15 bp, unidentified
  misc_feature 1..15: note = Synthetic
  source 1..15: mol_type = other DNA
atggcaagtgtttga

SEQ ID NO: 16086 - DNA, 93 bp, unidentified
  misc_feature 1..93: note = Synthetic
  source 1..93: mol_type = other DNA
acggctgtgttggttattcagaaaatgtatttgctgttgagagtggtggttatataccctccgactttgcattcaataattggttccttctaa

SEQ ID NO: 16087 - DNA, 180 bp, unidentified; identical to SEQ ID NO: 9597
  source 1..180: mol_type = other DNA
  misc_feature 1..180: note = Synthetic

SEQ ID NO: 16088 - DNA, 162 bp, unidentified; identical to SEQ ID NO: 9599
  misc_feature 1..162: note = Synthetic
  source 1..162: mol_type = other DNA

SEQ ID NO: 16089 - DNA, 222 bp, unidentified
  misc_feature 1..222: note = Synthetic
  source 1..222: mol_type = other DNA
atacctgagaacatgatggctgtctacaatgtcaccactaatggggctgactttcaagttggcatccgtcgtgatggctacatggtcacatctggaacaattggtactcagcaggagcttgaccctgacaccactttcacttatgttggacttttccccctttctgcctcattggttggcccacatgggaattctggacgggcccagatagcatggtcatga

SEQ ID NO: 16090 - DNA, 93 bp, unidentified
  misc_feature 1..93: note = Synthetic
  source 1..93: mol_type = other DNA
ttgaccctgacaccactttcacttatgttggacttttccccctttctgcctcattggttggcccacatgggaattctggacgggcccagatag

SEQ ID NO: 16091 - DNA, 1290 bp, unidentified
  misc_feature 1..1290: note = Synthetic
  source 1..1290: mol_type = other DNA
atggccgaagcttaccccggaggagcccatgcagcactagcgtcccggcgctcgtcgttcaggaacagcctccgccgcctgcggcccactgaaaaaccagacacgtcgttcatgagaggcgtgtggaagtacgagatcttcccctcatacgttcgcgtcaccaacaagcaggtattgcagctggacgcgcagtgccaagagctgcctccctgcccctcggtgggccagatactcagcttcaagttaccttctttctccttcaacacgaccacctacggcagccgctactttacggttgcgttcttgttctttggagcggaagacaacgaggtattcctcaagcccttcttcgttatgcactctgaccaggacatcgtgctaagcgtcctgaatccgcgcagcctgttcatagagaaagggaagtttacctggtacattgtgcccatcagattggtcaagaacccctacctctacctgcagattctgcccgggcagagcgacattcagctgacacgctcctgcacccagagtggggacaagctaaacaccagcgagccccagatcttcctcagtggctctcccgtcaccagccaggacgagtgcctgccttacctgctggcgcagcacacgcccccatttctaaagtcatacgcccgtattcacacattcccggggaaggtgtgtccggtcaacgccatacgccgcggtaagggctacgtccgagtctccgtggacacgccggacctgaaacgagagggcccgctgaacgtcaaggtgggcatgaccctattggatgatgtgattattgccttccattacaacccctaccctaagagccactggcgctgggacggggaatccacagacatccgctactttggctcccctgtgattattcctcctaatttcatcacggagctggaatacaacaacacctacgaggcccccctgagctccaagattacggccgttgtcgtgtcccactcctccaacccggtcttctacgtctacccacaggagtggaagccgggccagaccctcaagctgacggtccggaacatttccaacaaccccataacgatcgtgaccggccagagcatggcccaggcctttttcatctacgccggagacccctctatcagcaccatcatgagaagatacatccaacggcagggctgcgcgctcacgctgccagggaacattgttgtggagagctcctccctccccacctttgagagaatcaacaagacatttaacgggaatatcgtagcctccgagggcactctgtaa

SEQ ID NO: 16092 - DNA, 1290 bp, unidentified
  misc_feature 1..1290: note = Synthetic
  source 1..1290: mol_type = other DNA
atggccgaagcttaccccggaggagcccatgcagcactagcgtcccggcgctcgtcgttcaggaacagcctccgccgcctgcggcccactgaaaaaccagacacgtcgttcatgagaggcgtgtggaagtacgagatcttcccctcatacgtccgcgtcaccaacaagcaggtattgcagctggacgcgcagtgccaagagctgcctccctgcccctcggtgggccagatactcagcttcaagttaccttctttctccttcaacacgaccacctacggcagccgctactttacggtcgcgtttttgttctttggagcggaagacaacgaggtattcctcaagcccttcttcgttatgcactctgaccaggacatcgtgctaagcgtcctgaatccgcgcagcctgttcatagagaaagggaagtttacctggtacattgtgcccatcagattggtcaagaacccctacctctacctgcagattctgcccgggcagagcgacattcagctgacacgctcctgcacccagagcggggacaagctaaacaccagcgagccccagatcttcctcagtggctctcccgtcaccagccaggacgagtgcctgccttacctgctggcgcagcacacgcccccatttctaaagtcatacgcccgtattcacacattcccggggaaggtgtgtccggtaaacgccatacgccgcggtaagggctacgtccgagtctccgtggacacgccggacctgaaacgagagggcccgctgaacgtcaaggtgggcatgaccctattggatgatgtgattattgccttccgttacaacccctaccctaagagccactggcgctgggacggggaatccacagacatccgctactttggctcccctgtgattattcctcctaatttcatcacggagctggaatacaacaacacctacgaggcccccctgagctccaagattacggccgttgtcgtgtcccactcctccaacccggtcttctacgtctacccacaggagtggaagccgggccagaccctcaagctgacggtccggaacatttccaacaaccccataacgatcgtgaccggccagagcatggcccaggcctttttcatctacgccggagacccctctatcagcaccatcatgagaagatacatccaacggcagggctgcgcgctcacgctgccagggaacattgttgtggagagctcctccctccccacctttgagagaatcaacaagacatttaacgggaatatcgtagcctccgagggcactctgtaa

SEQ ID NO: 16093 - DNA, 1290 bp, unidentified
  misc_feature 1..1290: note = Synthetic
  source 1..1290: mol_type = other DNA
atggccgaagcttaccccggaggagcccatgcagcactagcgtcccggcgctcgtcgttcaggaacagcctccgccgcctgcggcccactgaaaaaccagacacgtcgttcatgagaggcgtgtggaagtacgagatcttcccctcatacgttcgcgtcaccaacaagcaggtattgcagctggacgcgcagtgccaagagctgcctccctgcccctcggtgggccagatactcagcttcaagttaccttctttctccttcaacacgaccacctacggcagccgctactttacggttgcgttcttgttctttggagcggaagacaacgaggtattcctcaagcccttcttcgttatgcactctgaccaggacatcgtgctaagcgtcctgaatccgcgcagcctgttcatagagaaagggaagtttacctggtacattgtgcccatcagattggtcaagaacccctacctctacctgcagattctgcccgggcagagcgacattcagctgacacgctcctgcacccagagtggggacaagctaaacaccagcgagccccagatcttcctcagtggctctcccgtcaccagccaggacgagtgcctgccttacctgctggcgcagcacacgcccccatttctaaagtcatacgcccgtattcacacattcccggggaaggtgtgtccggtcaacgccatacgccgcggtaagggctacgtccgagtctccgtggacacgccggacctgaaacgagagggcccgctgaacgtcaaggtgggcatgaccctattggatgatgtgattattgccttccgttacaacccctaccctaagagccactggcgctgggacggggaatccacagacatccgctactttggctcccctgtgattattcctcctaatttcatcacggagctggaatacaacaacacctacgaggcccccctgagctccaagattacggccgttgtcgtgtcccactcctccaacccggtcttctacgtctacccacaggagtggaagccgggccagaccctcaagctgacggtccggaacatttccaacaaccccataacgatcgtgaccggccagagcatggcccaggcctttttcatctacgccggagacccctctatcagcaccatcatgagaagatacatccaacggcagggctgcgcgctcacgctgccagggaacattgttgtggagagctcctccctccccacctttgagagaatcaacaagacatttaacgggaatatcgtagcctccgagggcactctgtaa

SEQ ID NO: 16094 - DNA, 483 bp, unidentified
  source 1..483: mol_type = other DNA
  misc_feature 1..483: note = Synthetic
ttgctggaacagagctctaacagtacctcttggttttggaggtttctgtggggctcctcccaggcaaagttagtctgcagaattaaggaggattacaagtgggaatttgaagagcttttgaaatcctgtggtgagctgtttgattctttgaatctgggtcaccaggcgcttttccaagagaaggtcatcaagactttggatttttccacaccggggcgcgctgcggctgctgttgcttttttgagttttataaaggataaatggagcgaagaaacccatctgagcggggggtacctgctggattttctggccatgcatctgtggagagcggtggtgagacacaagaatcgcctgctactgttgtcttccgtccgcccggcaataataccgacggaggagcaacagcaggaggaagccaggcggcggcggcggcaggagcagagcccatggaacccgagagccggcctggaccctcgggaatga

SEQ ID NO: 16095 - DNA, 36 bp, unidentified; identical to SEQ ID NO: 9609
  misc_feature 1..36: note = Synthetic
  source 1..36: mol_type = other DNA

SEQ ID NO: 16096 - DNA, 36 bp, unidentified; identical to SEQ ID NO: 9610
  misc_feature 1..36: note = Synthetic
  source 1..36: mol_type = other DNA

SEQ ID NO: 16097 - DNA, 141 bp, unidentified; identical to SEQ ID NO: 9611
  misc_feature 1..141: note = Synthetic
  source 1..141: mol_type = other DNA

SEQ ID NO: 16098 - DNA, 27 bp, unidentified
  misc_feature 1..27: note = Synthetic
  source 1..27: mol_type = other DNA
atgccggacaatagcacaattgtttag

SEQ ID NO: 16099 - DNA, 27 bp, unidentified
  source 1..27: mol_type = other DNA
  misc_feature 1..27: note = Synthetic
atgtggtttgaaaatcgctatcgctag

SEQ ID NO: 16100 - DNA, 39 bp, unidentified; identical to SEQ ID NO: 9614
  misc_feature 1..39: note = Synthetic
  source 1..39: mol_type = other DNA

SEQ ID NO: 16101 - DNA, 87 bp, unidentified; identical to SEQ ID NO: 9615
  misc_feature 1..87: note = Synthetic
  source 1..87: mol_type = other DNA

SEQ ID NO: 16102 - DNA, 1110 bp, unidentified
  misc_feature 1..1110: note = Synthetic
  source 1..1110: mol_type = other DNA
atggcggacatggacacgatatacatcaacttgatggcagatgatccaacccatcaaaaagaattgctgtcattccctctgattccagtgactggacctgatgggaagaaagtgctccaacaccagatccggacccaatccttgctcacctcagacaaacaaacggagaggttcatctttctcaacacttacgggttcatctatgacacaaccccggacaagacaactttttccacccctgagcatatcaatcagcctaagaggacaatggtgagtgctgcgatgatgactattggtctggttcctgctacaatacccctgaatgaattgacggccactgtgtttaaccttaaagtaagagtgaggaaaagtgcgaggtatcgagaagtggtttggtaccagtgcaaccccgtaccagctctgctcgcagccaccagatttggccgccaagggggtcttgagtcgagcaccggagtcagtgtaaaggcacctgagaagattgattgtgagaaagattatacttactacccttatttcctatctgtgtgctacatcgccacttccaacctctttaaggtaccgaagatggttgccaatgcaaccaacagtcaattgtatcacctaaccatgcaggtcacatttgcatttccgaaaaacattcccccagccaatcagaaactcctgacacaggtagatgaaggatttgagggtaccgtggattgccattttgggaacatgctaaaaaaggataggaaagggaacatgaggactttgtctcaagcagcagataaggtcagaagaatgaatatccttgtgggaatatttgacttgcacggacctacactattcctggaatatactgggaaattgacaaaagccctgttggggttcatgtccaccagccgaacagcaatcatccccatatcacaactcaatcctatgctgagtcaactcatgtggagcagtgacgcccagatagtaaagttacgggtggtcatcactacatctaaacgtggcccgtgtgggggcgagcaggaatatgtgctggatcctaaattcacagttaagaaagaaaaggctcgactcaatccattcaagaaggcagcctaa

SEQ ID NO: 16103 - DNA, 99 bp, unidentified
  source 1..99: mol_type = other DNA
  misc_feature 1..99: note = Synthetic
gtgtggctaatctcaaattaccacctcatgatgttactgtcttgcgtgacaatcttaaacctgttactacacttagtactattactgcttatttgttag

SEQ ID NO: 16104 - DNA, 45 bp, unidentified; identical to SEQ ID NO: 9625
  source 1..45: mol_type = other DNA
  misc_feature 1..45: note = Synthetic

SEQ ID NO: 16105 - DNA, 96 bp, unidentified; identical to SEQ ID NO: 9626
  misc_feature 1..96: note = Synthetic
  source 1..96: mol_type = other DNA

SEQ ID NO: 16106 - DNA, 30 bp, unidentified; identical to SEQ ID NO: 9627
  misc_feature 1..30: note = Synthetic
  source 1..30: mol_type = other DNA

SEQ ID NO: 16107 - DNA, 387 bp, unidentified
  misc_feature 1..387: note = Synthetic
  source 1..387: mol_type = other DNA
aaggtcttcgcgagtttttgggccttgaagcgggcccaccgaaaccaaaacccaatcagcagcatcaagatcaagcccgtggtcttgtgctgcctggttataactatctcggacccggaaacggtctcgatcgaggagagcctgtcaacagggcagacgaggtcgcgcgagagcacgacatctcgtacaacgagcagcttgaggcgggagacaacccctacctcaagtacaaccacgcggacgccgagtttcaggagaagctcgccgacgacacatccttcgggggaaacctcggaaaggcagtctttcaggccaagaaaagggttctcgaaccttttggcctggttgaagagggtgctaagacggcccctaccggaaagcggatag

SEQ ID NO: 16108 - DNA, 123 bp, unidentified
  misc_feature 1..123: note = Synthetic
  source 1..123: mol_type = other DNA
acggcgggtccaggggagcatcgaagggggaacccagcgccgccgccactggcgccgcgctcaccacgctctcgtaggagggaggaggaccttcctcatacatcgccgcgcgctgcatactaa

SEQ ID NO: 16109 - DNA, 123 bp, unidentified; identical to SEQ ID NO: 16108
  source 1..123: mol_type = other DNA
  misc_feature 1..123: note = Synthetic

SEQ ID NO: 16110 - DNA, 36 bp, unidentified; identical to SEQ ID NO: 9631
  misc_feature 1..36: note = Synthetic
  source 1..36: mol_type = other DNA

SEQ ID NO: 16111 - DNA, 135 bp, unidentified
  source 1..135: mol_type = other DNA
  misc_feature 1..135: note = Synthetic
atagaaagcatagatcttggaaatttggattttgcaccagcaataaccatttgtaaatcatcatactcagatatacttcctgcaaaaaatatggtatcttcttcgatgaggttttctagcagtagactcatttag

SEQ ID NO: 16112 - DNA, 135 bp, unidentified
  source 1..135: mol_type = other DNA
  misc_feature 1..135: note = Synthetic
atagaaagcatagatcttggaaatttggattttgcaccggcaataaccatttgtaaatcatcatactcagatatacttcctgcaaaaaatatggtatcttcttcgatgaggttttctagcagtagactcatttag

SEQ ID NO: 16113 - DNA, 27 bp, unidentified
  source 1..27: mol_type = other DNA
  misc_feature 1..27: note = Synthetic
atgccggacaatagcacaattgtttag

SEQ ID NO: 16114 - DNA, 27 bp, unidentified
  misc_feature 1..27: note = Synthetic
  source 1..27: mol_type = other DNA
atgccggacaatagcacaattgtttag

SEQ ID NO: 16115 - DNA, 36 bp, unidentified; identical to SEQ ID NO: 9631
  source 1..36: mol_type = other DNA
  misc_feature 1..36: note = Synthetic

SEQ ID NO: 16116 - DNA, 135 bp, unidentified
  source 1..135: mol_type = other DNA
  misc_feature 1..135: note = Synthetic
atagaaagcatagatcttggaaatttggattttgcgccggcaataaccatttgtaaatcatcatactcagatatacttcctgcaaaaaatatggtatcttcttcgatgaggttttctagcagtagactcatttag

SEQ ID NO: 16117 - DNA, 135 bp, unidentified; identical to SEQ ID NO: 16116
  misc_feature 1..135: note = Synthetic
  source 1..135: mol_type = other DNA

SEQ ID NO: 16118 - DNA, 888 bp, unidentified
  source 1..888: mol_type = other DNA
  misc_feature 1..888: note = Synthetic
atgggaaaagagatgatgttttttgtctttttgatttgcttatctctcacactcatgtcaaatttgaaatgtcaccagaatataatatttctagataataaattagaagctgtttgtgtcaccacgtgttatgttaatgaaatgctaatagggaattctagttgtttatctgtaagaacagcttttctgatttctttgtctttaaaaactgaaggatttcgcgaaatgagtctagtaaatcttactacaacatctcataaattaacctatttgagagtgctgatcaattattactttagaggagttatgttaagagcactaattgccaaaaaatggcactttgcttctcgggctaacagtacacttgaatgttggttagaaggtcataattcgggtggttccatcactattatgacagggggtcaaaagtttcttttgcagctaagatctggcatagttgcagttaagtggagaagcgtcggaaaagataaaaacaaaacacttgaaattctaaatcaaaaatttaattatgattgttatttcgtagcaatgatatgtcctcatttatctgatgaaatatatcaaaggaaagtcttaaatccaaactttacaatagtacgcaatgaaactatttataaaagatttttgcgcaaaacttggaagtcatcgtggcttgattggtacaagtacaaagaattggaagatctcagcgcttcatatggaggtaaaaatgtcatcttcttgaatgattacgaaagcttcctcgatcaaacccaagcgacaactattggtgtagtgtttcttgtcggcggatcagcaatggtactttttttgtttttctgtttgtcgatagtaaatcggcgcaaagttgacaagaatgttggttga

SEQ ID NO: 16119 - DNA, 867 bp, unidentified
  source 1..867: mol_type = other DNA
  misc_feature 1..867: note = Synthetic
atatttgatttaagttttaaaatgcaacaacctcgcggaagaagtcgaacccgcaaccaccaagtcacaccgactatatatcatgaaactcaattgccctccaaacctcattataccaattatcatccacgtgcaagatcgatgagctcaacccgtagtagtgcagaaagtagtcccaccaatcatattccccgtgctcgaccaccctcaacattcaacttatcgaaaccccctcctcctccaaaagacatgtgcaggaacatgaaaattggattgccgtgcgctgatcccacttgtaatagagatcatgaccttgataatctaacaaatcgtgaacttttgctattgatggcccgaaaaatgctccccaatacagacaagacctttagaagtccgcaggactgtggatcaccgtctctttctaaaggtctctcaaaagataaacaggagcaaacgaaagatgtgttgaccttggaaaatctaggacacattctgagctatctccacagatcagaaattgggaaattggatgagacatcacttcgtgcagcattaagtctgacgtgtgctggaattcgaaagacgaatagatccttgatcaacaccatgacagaattacacatgaaccatgaaaatctcccgcaagaccaaaacggtgttatcaagcagacctatacaggtattcaccttgacaaaggaggtcaattcgaagccgccttatggcaaggttgggataagagatcgatatctctattcgtacaagcagctttatatgtaatgaacaatatcccctgtgaatcatcaatcagtgtgcaagcctcatacgatcattttattcttcctcaaagtcaaggtaaaggacagtga

SEQ ID NO: 16120 - DNA, 63 bp, unidentified; identical to SEQ ID NO: 9646
  misc_feature 1..63: note = Synthetic
  source 1..63: mol_type = other DNA

SEQ ID NO: 16121 - DNA, 489 bp, unidentified
  misc_feature 1..489: note = Synthetic
  source 1..489: mol_type = other DNA
atgtcagctccacgcaaagtcagattgccttctgttaaggctgttgacatgagcatggaagacatggccgcccgcctggctcgcctggagtctgagaataaggctctgaagcaacaggtcctcagggggggtgcctgtgcctcgtctacctctgttccttctgctccagtgcctccgcctgagccgcttacagctcgacagcgagaggtaatgattacgcaggccacgggccgtttggcgtctcaggctatgaagaagattgaagacaaggtgcggaaatcagttgacggtgtaactacccgcaatgaaatggaaaatatattgcaaaatctgaccctccgcattcaagtatctatgttgggtgcaaaaggccaacccagccctggtgagggaacacgaccacgagaatcaaacgaccctaacgccacccgacgtgcccgctcccgctcccggggacgtgaagcaaagaaagtgcaaatttctgattaa

SEQ ID NO: 16122 - DNA, 489 bp, unidentified; identical to SEQ ID NO: 16121
  misc_feature 1..489: note = Synthetic
  source 1..489: mol_type = other DNA

SEQ ID NO: 16123 - DNA, 1581 bp, unidentified
  misc_feature 1..1581: note = Synthetic
  source 1..1581: mol_type = other DNA
acgaagaaaaagaaaacgagcctatttgtaatttttttgcagatgtcatcattgtggttgtcaacaacgggtaaggtctatttaccaccatcaacaccagttgccagggtgcaaagcacggactcctacatacaaagaacaaacatctattatcatgctaatactgaccgcctgttaacagtaggacatccttattttgatgtgaggaaaaataatggagatcatgaagtgttagttcccaaggtgtcaggtaatcagtacagggcctttagggtacacttaccggatcctaacagatttgctctagctgacatgtcagtggtaaatcctgatagggagcgtttggtatgggctgttagaggaatggaaattggtcgtggacagccattaggtgtaggtacatcaggacatccattatttaacaaggtgaaagacacggaaaatccaaatggctataatacaggtggaaaggatgatagggtgaatacatcctttgatcccaaacaaattcaaatgtttgttttgggttgtataccctgcttgggggaacattgggacaaggccttaccttgtgtagaaaatcctcctgatcagggagcgtgtccacctctagaattaaaaaatactattattgaagatggggacatgggagacatagggtttggaaatcttaattttaaaacattatcagtcactaagtctgatgttagtctggatattgttaatgaaatttgcaagtatccagatttcttaaaaatggctaatgatgtgtatggcaatgcttgcttcttttatgccagaagagaacaatgttatgccagacatatgttttgtagaggtgggtcagtaggagacagtattccagatgatgcagttggagaagacaaccattattatttaaaggctgccagtgatcaaaacagagatacaatggcaagttccatttacactcccacagtcagtggatctttagtttctacagatgcacagattttcaataggcctttttggctgcaaagggctcaaggccataataatggtatttgctggggtaatcaaatctttctcacagtaatagataataccaggaatactaatttctgtatcagtgtctcctcaaatgatcaggcattacaggaatacaatactgcaaactttagagaatatttgagacatgtagaagagtatgaattatcctttatattacaattatgtaaagttccattagagccagaagtattagcacaaattaatgctatgaatgcagacattttagaagattggcaattaggttttgttccttctcctgacaatcccatcaatgatacatatagatacatacattcagcagccacacggtgtccagataaaactacacctaaagaaaaagcagatccctttgcaggttatcacttttgggatgttgatttgtctgaaaagttatcattagatttagatcagtattctctgggacgtaaattcttatttcaagccaacctgcaaaacaaaagagttaacagaggggttactgtaaccgggagggctacaacctcaagaggtacaaaacgaaaacgacgctga

SEQ ID NO: 16124 - DNA, 24 bp, unidentified
  misc_feature 1..24: note = Synthetic
  source 1..24: mol_type = other DNA
atgctaatactgaccgcctgttaa

SEQ ID NO: 16125 - DNA, 489 bp, unidentified
  misc_feature 1..489: note = Synthetic
  source 1..489: mol_type = other DNA
atgtcagctccacgcaaagtcagattgccttctgttaaggctgttgacatgagcatggaagacatggccgcccgcctggctcgcctggagtctgagaataaggctctgaagcaacaggtcctcagagggggtgcctgtgcctcgtctacctctgttccttctgctccagtgcctccgcctgagccgcttacagctcgacagcgagaggtaatgattacgcaggccacgggccgtttggcgtctcaggctatgaagaagattgaagacaaggttcggaaatctgttgacggtgtaactacccgcaatgaaatggaaaatatattgcaaaatctgaccctccgcattcaagtatctatgttgggtgcaaaaggccaacccagccctggtgagggaacacgaccacgagaatcaaacgaccccaacgccacccgacgtgcccgctcccgctcccggggacgtgaagcaaagaaagtgcaaatttctgattaa

SEQ ID NO: 16126 - DNA, 54 bp, unidentified; identical to SEQ ID NO: 9660
  misc_feature 1..54: note = Synthetic
  source 1..54: mol_type = other DNA

SEQ ID NO: 16127 - DNA, 3507 bp, unidentified
  source 1..3507: mol_type = other DNA
  misc_feature 1..3507: note = Synthetic
attgcttctaaaatgaaaaaaaacactgattcagaaatggatcaacgactagggtataagtttttggtgcctgatcctaaagccggagttttttatagaccgttacatttccaatatgtatcgtattctaattttatattgcatcgattgcatgaaatcttgaccgtcaagcggccactcttatcgtttaagaataatacagaacgaattatgatagaaattagcaatgttaaagtgactcctccagattactcacctataatcgcgagtattaaaggtaagagttatgatgcattagccacgttcactgtaaatatctttaaagaggtaatgaccaaagagggtatatccatcactaaaataagtagttatgagggaaaagattctcatttgataaaaattccgctactaataggatacgggaataaaaatccacttgatacagccaagtatcttgttcctaatgtcataggtggagtctttatcaataaacaatctgtcgaaaaagtaggaattaatctagtagaaaagattacaacatggccaaaatttagggttgttaagccaaactcattcactttctcgttttcctccgtatcccctcctaatgtattaccgacaagatatcgccattacaagatatctctggatatatcacaattggaagcgttgaatatatcatcgacaaagacatttataacggtcaatattgttttgctgtctcaatatttatctagagtgagtctagaattcattagacgtagtttatcatacgatatgcctccagaagttgtctatctagtaaacgcgataatagatagtgctaaacgaattactgaatctattactgactttaatattgatacatacattaatgacctggtggaagctgaacacattaaacaaaaatctcagttaacgatcaacgagttcaaatatgaaatgctgcataactttttacctcatatgaactatacacccgatcaactaaagggattttatatgatatctttactaagaaagtttctctactgtatctaccacacttctagatatccagatagagattcgatggtttgtcatcgcatcctaacgtacggcaaatattttgagacgttggcacatgatgaattagagaattacataggcaacatccgaaacgatatcatgaacaatcacaagaacagaggcacttacgcggtaaacattcatgtactaacaactcccggacttaatcacgcgttttctagcttattgagtggaaagttcaaaaagtcagacggtagttatcgaacacatcctcactattcatggatgcagaatatttctattcctaggagtgttggattttatccggatcaagtaaagatttcaaagatgttttctgtcagaaaataccatccaagtcaatatctttacttttgttcatcggacgttccggaaagaggtcctcaggtaggtttagtatctcaattgtctgtcttgagttccattacaaatatactaacgtctgagtatttggatttggaaaagaaaatttgtgagtatatcagatcatattataaagatgatataagttactttgaaacaggatttccaatcactatagaaaatgctctagtcgcatctcttaatccaaatatgatatgtgattttgtaactgactttagacgtagaaaacggatgggattcttcggtaacttggaggtaggtattactttagttagggatcacatgaatgaaattcgcattaatattggagcgggaagattagtcagaccattcttggttgtggataacggagagctcatgatggatgtgtgtccggagttagaaagcagattagacgacatgacattctctgacattcagaaagagtttccgcatgtcatcgaaatggtagatatagaacaatttacttttagtaacgtatgtgaatcggttcaaaaatttagaatgatgtcaaaggatgaaagaaagcaatacgatttatgtgactttcctgccgaatttagagatggatatgtggcatcttcattagtgggaatcaatcacaattctggacccagagctattcttggatgtgctcaagctaaacaagctatctcttgtctgagttcggatatacgaaataaaatagacaatggaattcatttgatgtatccagagaggccaatcgtgattagtaaggctttagaaacttcaaagattgcggctaattgcttcggccaacatgttactatagcattaatgtcgtacaaaggtatcaatcaagaggatggaattatcatcaaaaaacaatttattcagagaggcggtctcgatatagttaccgcaaagaaacatcaagtagaaattccgttggaaaactttaataacaaagaaagagataggtctaacgcctattcaaaattagaaagtaatggattagttagactgaatgctttcttggaatccggagacgctatggcacgaaatatctcatcaagaactcttgaagatgattttgctagagataatcagattagcttcgatgtttccgagaaatataccgatatgtacaaatctcgcgttgaacgagtacaagtagaacttactgacaaagttaaggtacgagtattaaccatgaaagaaagaagacccattctaggagataaatttaccactagaacgagtcaaaagggaacagtcgcgtatgtcgcggatgaaacggaacttccatacgacgaaaatggtatcacaccagatgtcattattaattctacatccatcttctctagaaaaactatatctatgttgatagaggttattttaacagccgcatattctgctaagccgtacaacaataagggagaaaaccgacctgtctgttttcctagtagtaacgaaacatccatcgatacatatatgcaattcgctaaacaatgttatgagcattcaaatccgaaattgtccgatgaagaattatcggataaaatcttttgtgaaaagattctctatgatcctgaaacggataagccttatgcatccaaagtattttttggaccaatttattacttgcgtctgaggcatttaactcaggacaaggcaaccgttagatgtagaggtaaaaagacgaagctcattagacaggcgaatgagggacgaaaacgtggaggaggtatcaagttcggagaaatggagagagactgtttaatagcgcatggcgcagccaatactattacagaagttttaaaagactcagaagaggattatcaagatgtgtatgtttgtgaaaattgtggagacatagcagcacaaatcaagggtattaatacatgtcttagatgttcaaaacttaatctctctcctctcttaacaaaaattgataccacgcacgtatctaaagtatttcttactcaaatgaacgccagaggcgtaaaagtcaaattagatttcgaacgaaggcctccttcgttttataaaccattagataaagttgatctcaagccgtcttttctggtgtaa

SEQ ID NO: 16128 - DNA, 69 bp, unidentified
  misc_feature 1..69: note = Synthetic
  source 1..69: mol_type = other DNA
atagaccgttacatttccaatatgtatcgtattctaattttatattgcatcgattgcatgaaatcttga

SEQ ID NO: 16129 - DNA, 54 bp, unidentified; identical to SEQ ID NO: 9660
  source 1..54: mol_type = other DNA
  misc_feature 1..54: note = Synthetic

SEQ ID NO: 16130 - DNA, 3507 bp, unidentified
  misc_feature 1..3507: note = Synthetic
  source 1..3507: mol_type = other DNA
attgcttctaaaatgaaaaaaaacactgattcagaaatggatcaacgactcgggtataagtttttggtacctgatcctaaagccggagttttttatagaccgttacatttccaatatgtatcgtattctaattttatattgcatcgattgcatgaaatcttgaccgtcaagcggccactcttatcgtttaagaataatacagaacgaattatgatagaaattagcaatgttaaagtgactcctccagattactcacctataatcgcgagtattaaaggtaagagttatgacgcattagccacgttcactgtaaatatctttaaagaggtaatgaccaaagagggtatatccatcactaaaataagtagttatgagggaaaagattctcatttgataaaaattccgctactaataggatacgggaataaaaatccacttgatacagccaagtatcttgttcctaatgtcataggtggagtctttatcaataaacaatctgtcgaaaaagtaggaattaatctagtagaaaagattacaacatggccaaaatttagggttgttaagccaaactcattcactttctcgttttcctccgtatcccctcctaatgtattaccgacaagatatcgccattacaagatatctctggatatatcacaattggaagcgtcgaatatatcatcgacaaagacatttataacggtcaatattgttttgctatctcaatatttatctagagtgagtctagaattcattagacgtagtttatcatatgatatgcctccagaagttgtctatctagtaaacgcgataatagatagtgctaaacgacttaccgaatctattactgactttaatatcgatacatacattaatgacctggtggaagccgaacacattaaacaaaaatctcagttaacgattaacgagttcaaatatgaaatgctgcataactttttacctcatatgaactatacacccgatcaactaaagggattttatatgatatctttactaagaaagtttctctactgtatctaccacacttctagatatccggatagagattcgatggtttgtcatcgtatactaacatacggcaaatattttgagacgttggcacatgatgaattagagaattacataggcaacatccgaaacgatatcatgaacaatcacaagaacagaggcacttatgcggtaaacattcatgtactaacaactcccggacttaatcatgcattttctagtctattgagtggaaagttcaaaaagtcagacggtagttatcgaacacatcctcactattcatggatgcagaatatttctattcctagaagtgttggattttatccggatcaagtaaagatttcaaagatgttttctgtcagaaaataccatccaagtcaatatctttacttttgttcatcagacgttccggaaagaggtcctcaggtaggtttagtatctcaattgtctgtcttgagttccattacaaatatactaacgtctgagtatttggatttggaaaagaaaatttgtgagtatatcagatcatattataaagatgatataagttactttgaaacaggatttccaatcactatagaaaatgctctagtcgcatctcttaatccaaatatgatatgtgattttgtaactgactttaggcgtagaaaacggatgggattcttcggtaacttggaggtaggtattactttagttagggatcacatgaatgaaattcgcattaatattggagcaggaagattagtcagaccattcttggttgtggataacggagagctcatgatggatgtgtgtccggagttagaaagcagattagacgacatgacattctctgacattcagaaagagtttccgcatgtcatcgaaatggtagatatagaacaatttacttttagtaacgtatgtgaatcggttcaaaaatttagaatgatgtcaaaggacgaaagaaagcaatacgatttatgtgactttcctgccgaattcagagatggatatgtggcatcttcattagtgggaatcaatcacaattctggacccagagctattcttggatgtgctcaagctaaacaagctatctcttgtctgagctcggatatacgaaataaaatagacaatggaattcatttgatgtatccagagaggccaatcgtgattagtaaggctttagaaacttcaaagattgcggctaattgcttcggccaacatgttactatagcattaatgtcgtataaaggcatcaatcaagaggatggaattatcatcaaaaaacaatttattcagagaggcggtctcgatatagttaccgcaaagaaacatcaagtagaaattccattggaaaactttaataacaaagaaagagataggtctaatgcatattcgaaattagaaagtaatggattagttagactgaatgctttcttggaatccggagacgctatggcacgaaatatctcatcaagaactctcgaagatgattttgctagagataatcagattagcttcgatgtttccgagaaatataccgatatgtacaaatctcgcgttgaacgagtgcaagtagaacttactgacaaagttaaggtgcgagtattaaccatgaaagaaagaagacccattctaggagataaattcaccactagaacgagtcaaaagggaacagtcgcgtatatcgcggatgaaactgaacttccatacgacgaaaatggtatcacgccagatgtcattattaattctacatccatcttctctagaaaaactatatctatgttgatagaagttattttaacagccgcatattctgctaagccgtacaacaataagggagaaaaccgacctgtctgttttcctagtagtaacgaaacatccatcgatacatatatgcaattcgctaaacaatgttatgagcattcaaatccgaaattgtctgatgaagaattatcggataaaatcttttgtgaaaagattctctatgatcctgaaacggataagccttatgcatccaaagtattttttggaccaatttattacttgcgtctgaggcatttaactcaggacaaggcaaccgttagatgtagaggtaaaaagacgaagctcattagacaggcaaatgagggacgaaaacgtggaggaggtatcaagttcggagaaatggagagagactgtttaatagcgcatggtgcagccaatactattacagaagttttgaaagattcggaagaagattatcaagatgtgtatgtttgtgaaaattgtggagacatagcagcacaaatcaaaggtattaatacatgtcttagatgttcaaaacttaatctctctcctctcttaacaaaaattgataccacgcacgtatctaaagtatttcttactcaaatgaatgccagaggcgtaaaagtcaaattagatttcgaacgaagacctccttcgttttataaaccattagataaagttgatctcaaaccgtcttttctggcataa

SEQ ID NO: 16131 - DNA, 93 bp, unidentified
  misc_feature 1..93: note = Synthetic
  source 1..93: mol_type = other DNA
ctgatcctaaagccggagttttttatagaccgttacatttccaatatgtatcgtattctaattttatattgcatcgattgcatgaaatcttga

SEQ ID NO: 16132 - DNA, 54 bp, unidentified; identical to SEQ ID NO: 9660
  misc_feature 1..54: note = Synthetic
  source 1..54: mol_type = other DNA

SEQ ID NO: 16133 - DNA, 3507 bp, unidentified
  source 1..3507: mol_type = other DNA
  misc_feature 1..3507: note = Synthetic
attgcttctaaaatgaaaaaaaacactgtttcagaaatggatcaacgactcgggtataagtttttggtgcctgatcctaaagccggagttttttatagaccgttacatttccaatatgtatcgtattctaattttatattgcatcgattgcatgaaatcttgaccgtcaagcggccactcttatcgtttaagaataatacagaacgaattatgatagaaattagcaatgttaaagtgactcctccagattactcacctataattgcgagtattaaaggtaagagttatgacgcattagccacgttcactgtaaatatctttaaagaggtaatgaccaaagagggtatatccatcactaaaataagtagttatgagggaaaagattctcatttgataaaaattccgctactaataggatatgggaataaaaatccacttgatacagccaagtatcttgttcctaatgtcataggtggagtctttatcaataaacaatctgtcgaaaaagtaggaattaatctagtagaaaagattacaacatggccaaaatttagggttgttaagccaaactcattcactttctcgttttcctccgtatcccctcctaatgtattaccgacaagatatcgccattacaagatatctctggatatatcacaattggaagcgtctaatatatcatcgacaaagacatttataacggtcaatattgttttgctgtctcaatatttatctagagtgagtctagaattcattagacgtagtttatcatacgatatgcctccagaagttgtctatctagtaaacgcgataatagatagtgctaaacgacttaccgaatctattactgactttgatattgatacatacattaatgacctggtggaagctgaacacattaaacaaaaatctcagttaacgattaacgagtttaaatatgaaatgctgcataactttttacctcatatgaactatacacccgatcaactaaagggattttatatgatatctttactaagaaagtttctctactgtatctaccacacttctagatatccagatagagattcgatggtttgtcatcgcatcctaacgtacggcaaatattttgagacgttggcacatgatgaattagagaattacataggtaacatccgaaacgatatcatgaacaatcacaagaacagaggcacttacgcagtaaacattcatgtactaacaactcctggacttaatcatgcattttctagtctattgagtggaaagttcaaaaagtcagacggtagttatcgaacacatcctcactattcatggatgcagaatatttctattcctagaagtgttggattttatccggatcaagtaaagatttcaaagatgttttctgtcagaaaataccatccaagccaatatctttacttttgttcatcagacgttccggaaagaggtcctcaggtaggtttagtatctcaattgtctgtcttgagttccattacaaatatactaacgtctgagtatttggatttggaaaagaaaatttgtgagtatatcagatcatattataaagatgatataagttactttgaaacaggatttccaatcactatagaaaatgctctagtcgcatctcttaatccaaatatgatatgtgattttgtaactgactttagacgtagaaaacggatgggattcttcggtaacttggaggtaggtattactttagttagggatcacatgaatgaaattcgcattaatattggagcaggaagattagtcagaccattcttggttgtggataacggagagctcatgacggatgtgtgtccggagttagaaagcagattagacgacatgacattctctgacattcagaaagagtttccacatgtcatcgaaatggtagatatagaccaatttacttttagtaacgtatgtgaatcggttcaaaaatttagaatgatgtcaaaggatgaaagaaagcaatacgatttatgtgactttcctgccgaatttagagatggatatgtagcatcttcactagtgggaatcaatcacaattctggacccagagctattcttggatgtgctcaagctaaacaagctatctcttgtctgagttcggatatacgaaataaaatagacaatggaattcatttgatgtatccagagaggccaattgtgattagtaaggctttagaaacttcaaagattgcggctaattgcttcggacaacatgttactatagcattaatgtcgtacaaaggtatcaatcaagaggatggaattatcatcaaaaaacaatttattcagagaggcggtctcgatattgttacagccaagaaacatcaagtagaaattccattggaaaactttaataacaaagaaagagataggtctaacgcctattcgaaattagaaagtaatggattagttagactgaatgctttcttggaatccggagacgctatggcaagaaatatctcatcaagaactcttgaagatgattttgctagagataatcagattagctttgatgtttccgagaaatatacagatatgtacaaatctcgcgttgaacgagtacaagtagaacttactgacaaagttaaggtgcgagtattaaccatgaaagaaagaagacccattctaggagacaaatttactactagaacgagtcaaaagggaacagtcgcgtatatcgcagatgaaacggaacttccgtacgacgaaaatggtatcacaccagatgtcattattaattctacatccatcttctctagaaaaactatatctatgttgatagaagttattttaacagccgcatattctactaagccgtacaacaataagggagaaaaccgacctgtctgttttcctagtagtaacgaaacatccattgatgcatatatgcaattcgctaaacaatgttatgagtattcaaatccgaaattgtccgaggaagaattatcggataaaatcttttgtgaaaagattctctatgatcctgaaacggataagccttatgaatccaaagtattttttggaccaatttattacttgcgtctgagacatttaactcaggacaaggcaaccgttagatgtagaggtaaaaagacgaagctcattagacaagcgaatgagggacgaaaacgtggaggaggtatcaagtttggagaaatggagagagactgtttaatagcacatggcgcagccaatactattacagaagttttaaaagactcagaagaggattatcaagatgtgtatatttgtgaaaattgtggagacatagcagcacaaatcaaaagtattaatacatgtcttagatgttcaaaacttaatctctctcctctcttaacaaaaattgataccacacacgtatctaaagtatttcttactcaaatgaacgccagaggcgtaaaagttaaattagatttcgaacgaaggcctccttcgttttataaaccattagataaagttgatcttaaaccgtcttttctggtataa

SEQ ID NO: 16134 - DNA, 69 bp, unidentified; identical to SEQ ID NO: 16128
  source 1..69: mol_type = other DNA
  misc_feature 1..69: note = Synthetic

SEQ ID NO: 16135 - DNA, 3495 bp, unidentified
  source 1..3495: mol_type = other DNA
  misc_feature 1..3495: note = Synthetic
atgaaaaaaaacactgattcagaaatggatcaacgactcgggtataagtttttggtacctgatcctaaagccggagttttttatagaccgttacatttccaatatgtatcgtattctaattttatattgcatcgattgcatggaatcttgaccgtcaagcggccacttttatcgtttaagaataatacagaacgaattatgatagaaattagcaatgttaaagtgactcctccagattactcacctataatcgcgagtattaaaggtaagagttatgacgcattagccacgttcactgtaaatatctttaaagaggtaatggccaaagagggtatatccatcactaaaataagtagctatgagggaaaagattctcatttgataaaaattccgctactaataggatacgggaataaaaatccacttgatacagccaagtatcttgtccctaacgtcataggtggggtatttatcaataaacaatctgtcgaaaaagtaggaattaatctagtagaaaagattacaacatggccaaaatttagggttgttaagccaaactcattcacgttctcgttttcctccgtatcccctcctaatatattaccgacaagatatcgccattacaagatatctctggatatatcacaattggaagcgtcgaatatatcatcgacaaagacatttataacggtcaatattgttttactgtctcaatatttatctagagtgagtttaggattcattagacgtagtttatcatacgatatgcctccagaagttgtctatttagtaaacgcgataatagatagtgctaaacgacttaccgaatctattactgactttaatattgatacgtatattaatgacctggtggaagctgaacacgttaaacaaaaatctcagttaacgattaacgagttcaaatatgaaatgctacataactttttacctcatatgaactatacacccgatcaactaaagggattttatatgatatctttactaagaaagtttctttactgtatctactacacttctagatatccagatagagattcaatggtttgtcatcgcatcctaacatacggcaaatattttgagacgttggcacatgatgaattagagaattacataggcaacatcagaaacgacatcatgaacaatcacaagaatagaggcacttacgcggtaaacattcatgtactaacaactcccggacttaatcacgcgttttctagcttattgagtggaaagttcaaaaagtcagacggtagttatcgaacacatcctcactattcatggatgcagaatatttctattcctagaagtgttgggttttatccggatcaagtaaagatttcaaagatgttttctgtcagaaaataccatccaagtcaatatctttacttttgttcatcagatgttccggaaagaggtcctcaggtaggtttagtatctcaattgtctgtcttaagttccattacaaatatactaacgtctgagtatttggatttggaaaagaaaatttgtgagtatatcagatcatattataaagatgatataagttactttgaaacaggatttccaatcactatagaaaatgctctagtcgcatctcttaatccaaatatgatatgtgattttgtaactgactttagacgtagaaaacggatgggattcttcggtaacttggaggtaggtattactttagttagggatcacatgaatgaaattcgtattaatattggagcaggaagattagtcagaccattcttggtggtggataacggagagctcatgatggatgtgtgtccggagttagaaagcagattagatgacatgacattctctgacattcagaaagagttcccacatgtcatcgaaatggtagatatagaacaatttacttttagtaacgtatgtgaatctgttcaaaaatttagaatgatgtcaaaggatgaaagaaagcaatacgatttatgtgactttcctgccgaatttagagatggatatgtagcatcttcactagtgggaatcaatcacaattctggtccaagagctattcttggatgtgctcaagctaaacaagctatctcttgtctgagttcggatatacgaaataaaatagacaatggaattcatttgatgtatccagagaggccaattgtcattagtaaggctttagaaacttcaaagattgcggctaattgcttcggacaacatgttactatagcattaatgtcgtacaaaggtatcaatcaagaggatggaattatcatcaaaaaacaatttattcagagaggcggtcttgatattgttacagccaagaaacaccaagtagaaattccattggaaaactttaataacaaagaaagagataggtctaacgcctattcgaaattagaaagtaatggattagttagactgaatgctttcttggaatccggagacgctatggcacgaaatatctcatcaagaactcttgaagatgattttgctagagataatcagattagctttgatgtttccgagaaatataccgatatgtacaaatctcgcgttgaacgagtgcaagtagaacttactgacaaagttaaggtgcgagtattaaccatgaaagaaagaagacccattctaggagataaatttaccactagaacgagtcaaaagggaacagtcgcgtatatcgcagatgaaacggaacttccatacgacgaaaatggtatcacaccagatgtcattattaattctacatccatcttctctagaaaaactatatctatgttgatagaagttattttaacagccgcatattccgctaagccgtacaacaataagggagaaaaccgacctgtctgttttcctagtagtaacgaaacatccatcgatacatatatgcaattcgctaaacaatgttatgagcatttaaatccgaaattgaccgagaaagaattatcggataaaatcttttgtgaaaagattctttatgatcctgaaacggataagccttatgcatccaaagtattttttggaccaatttattacttgcgtctgagacatttaactcaggacaaggcaaccgttagatgtagaggtaaaaagacgaagctaattagacaagcgaatgagggacgaaaacgtggaggaggtatcaagtttggagaaatggagagagactgtttaatagcgcatggcgcagccaatactattacagaagttttaaaagactcagaagaggattatcaagatgtgtatatttgtgaaaattgtggagacatagcagcacaaatcaaaagtattaatacatgtcttagatgttcaaaacttaatctctctcctctcttaacaaaaattgataccacgcacgtatctaaagtatttcttactcaaatgaacgccagaggcgtaaaagtcaaattagatttcgaacgaagacctccttcgttttataaaccattagataaagttgatctcaagccgtcttttctgaagtag

SEQ ID NO: 16136 - DNA, 69 bp, unidentified
  source 1..69: mol_type = other DNA
  misc_feature 1..69: note = Synthetic
atagaccgttacatttccaatatgtatcgtattctaattttatattgcatcgattgcatggaatcttga

SEQ ID NO: 16137 - DNA, 42 bp, unidentified; identical to SEQ ID NO: 9671
  misc_feature 1..42: note = Synthetic
  source 1..42: mol_type = other DNA

SEQ ID NO: 16138 - DNA, 51 bp, unidentified; identical to SEQ ID NO: 9672
  source 1..51: mol_type = other DNA
  misc_feature 1..51: note = Synthetic

SEQ ID NO: 16139 - DNA, 51 bp, unidentified; identical to SEQ ID NO: 9672
  source 1..51: mol_type = other DNA
  misc_feature 1..51: note = Synthetic

SEQ ID NO: 16140 - DNA, 51 bp, unidentified; identical to SEQ ID NO: 9672
  misc_feature 1..51: note = Synthetic
  source 1..51: mol_type = other DNA

SEQ ID NO: 16141 - DNA, 207 bp, unidentified
  misc_feature 1..207: note = Synthetic
  source 1..207: mol_type = other DNA
acgccagaacaagtattgttggcgcaggttacaatgcaactcttcaatctgcttacatgccagattccgaccagataccccatattacgtggtacttacaaacctccaaacctaattcttcattttatgaaggaaacaaactctgcgatgactccgacaacagaacgcacacatttccccacccttcactacaattcgaatgcgtaa

SEQ ID NO: 16142 - DNA, 33 bp, unidentified; identical to SEQ ID NO: 9676
  source 1..33: mol_type = other DNA
  misc_feature 1..33: note = Synthetic

SEQ ID NO: 16143 - DNA, 15 bp, unidentified
  source 1..15: mol_type = other DNA
  misc_feature 1..15: note = Synthetic
ctgttgttggtatag

SEQ ID NO: 16144 - DNA, 237 bp, unidentified
  misc_feature 1..237: note = Synthetic
  source 1..237: mol_type = other DNA
aagatgttccttcgattaattgatgacaatggtattgtcctcaattccattttatggctccttgttatgatatttttctttgtgttggcaatgacctttattaaactgattcaattgtgttttacttgtcattatttttttagtaggacattatatcaaccagtttataaaatttttcttgcttaccaagattatatgcaaatagcacctgttccagctgaagtactaaatgtctaa

SEQ ID NO: 16145 - DNA, 129 bp, unidentified
  source 1..129: mol_type = other DNA
  misc_feature 1..129: note = Synthetic
atggcaatcctgaaaatacaatgttatacactatttggacacatatatattttgaagatgacgaaggcaactggcaaaagactgagggacatttggactatcatggtgcctattttatggatggattaa

SEQ ID NO: 16146 - DNA, 1872 bp, unidentified
  misc_feature 1..1872: note = Synthetic
  source 1..1872: mol_type = other DNA
atggggacagttaataaacctgtggtgggggtattgatggggttcggaattatcacgggaacgttgcgtataacgaatccggtcagagcatccgtcttgcgatacgatgattttcacaccgatgaagacaaactggatacaaactccgtatatgagccttactaccattcagatcatgcggagtcttcatgggtaaatcggggagagtcttcgcgaaaagcgtacgatcataactcaccttatatatggccacgtaatgattatgatggatttttagagaacgcacacgaacaccatggggtgtataatcagggccgtggtatcgatagcggggaacggttaatgcaacccacacaaatgtctgcacaggaggatcttggggacgatacgggcatccacgttatccctacgttaaacggcgatgacagacataaaattgtaaatgtggaccaacgtcaatacggtgacgtgtttaaaggagatcttaatccaaaaccccaaggccaaagactcattgaggtgtcagtggaagaaaatcacccgtttactttacgcgcaccgattcagcggatttatggagtccggtacaccgagacttggagctttttgccgtcattaacctgtacgggagacgcagcgcccgccatccagcatatatgtttaaaacatacaacatgctttcaagacgtggtggtggatgtggattgcgcggaaaatactaaagaggatcagttggccgaaatcagttaccgttttcaaggtaagaaggaagcggaccaaccgtggattgttgtaaacacgagcacactgtttgatgaactcgaattagacccccccgagattgaaccgggtgtcttgaaagtacttcggacagaaaaacaatacttgggtgtgtacatttggaacatgcgcggctccgatggtacgtctacctacgccacgtttttggtcacctggaaaggggatgaaaaaacaagaaaccctacgcccgcagtaactcctcaaccaagaggggctgagtttcatatgtggaattaccactcgcatgtattttcagttggtgatacgtttagcttggcaatgcatcttcagtataagatacatgaagcgccatttgatttgctgttagagtggttgtatgtccccatcgatcctacatgtcaaccaatgcggttatattctacgtgtttgtatcatcccaacgcaccccaatgcctctctcatatgaattccggttgtacatttacctcgccacatttagcccagcgtgttgcaagcacagtgtatcaaaattgtgaacatgcagataactacaccgcatattgtctgggaatatctcatatggagcctagctttggtctaatcttacacgacgggggcaccacgttaaagtttgtagatacacccgagagtttgtcgggattatacgtttttgtggtgtattttaacgggcatgttgaagccgtagcatacactgttgtatccacagtagatcattttgtaaacgcaattgaagagcgtggatttccgccaacggccggtcagccaccggcgactactaaacccaaggaaattacccccgtaaaccccggaacgtcaccacttctacgatatgccgcatggaccggagggcttgcagcagtagtacttttatgtctcgtaatatttttaatctgtacggctaaacgaatgagggttaaagcctatagggtagacaagtccccgtataaccaaagcatgtattacgctggccttccagtggacgatttcgaggactcggaatctacggatacggaagaagagtttggtaacgcgattggagggagtcacgggggttcgagttacacggtgtatatagataagacccggtga

SEQ ID NO: 16147 - DNA, 10275 bp, unidentified; identical to SEQ ID NO: 10796
  source 1..10275: mol_type = other DNA
  misc_feature 1..10275: note = Synthetic

SEQ ID NO: 16148 - DNA, 69 bp, unidentified
  misc_feature 1..69: note = Synthetic
  source 1..69: mol_type = other DNA
atgagaattatggcaatattaaggaatttaatgctactcatgcagcattcgaatattcaaaatctatag

SEQ ID NO: 16149 - DNA, 168 bp, unidentified
  misc_feature 1..168: note = Synthetic
  source 1..168: mol_type = other DNA
atttcgttgttctatacatttgccattagttattgccgagcattcatttactcaattatggaaaccatagatccggtgtatatatctcagttcagttataaagaattatacgttagtagctcttataaagatattaatgaatccatgagtcagatggtaaaattataa

SEQ ID NO: 16150 - DNA, 108 bp, unidentified; identical to SEQ ID NO: 9693
  misc_feature 1..108: note = Synthetic
  source 1..108: mol_type = other DNA

SEQ ID NO: 16151 - DNA, 108 bp, unidentified; identical to SEQ ID NO: 9693
  misc_feature 1..108: note = Synthetic
  source 1..108: mol_type = other DNA

SEQ ID NO: 16152 - DNA, 252 bp, unidentified
  source 1..252: mol_type = other DNA
  misc_feature 1..252: note = Synthetic
aagccatttagaagtctaacgaaaagggaaatagaaactttacttgacatgtggcacgtatcaagaaccaatctgaaaacctacaaagagttacgtaaggctctgacagaagcttcaaaaaaaagacaaagaaaaaaaatttataaattactaggtcacaatataagttcttatatcagtgaaactggttgtctcttccagcatgcagatgcggggatgtgtttgtcatctgggtgtctattgcgttcataa

SEQ ID NO: 16153 - DNA, 1131 bp, unidentified
  source 1..1131: mol_type = other DNA
  misc_feature 1..1131: note = Synthetic
atgtacagcgcaatttcagaaaagatctccgaaacgattaccctacagagacaaacgagctcgagatacattgaatttttcgtctttcgaaatgtggacatcaatgaactttggactacagacatatctgaagacaaaacgcacgacgtgtggccggctgtaaatgagaaatcatttaaaaaatttctagaaaacgaactaacctcttatcaacgcccaatcccgcttctaggtattccgcaaaatggaacagtgtcgaagacctgcaaaaaagagaagcaaagagaaaccgattgtgttaactatgaaaggaaacgcggcaacccagtaactttctacccaaggcaccgcgcaaaaagaaatgcaaatacggacacttgtatttcggaagaaccatctattttagtaagccatcacaggaatagtaaaatggacgtttttatggacaccaacaaaatcacactcgtaaatagagaactcatatgggtgccgcacgatcaagttcgaatcgtaaaactagatatttccctgtacatcccagatggtttcttcggagttattactggccacagcaacgacgtattctgcgaatgcgtcactgaaataataaccgacgaaaccgacatttcagtttttctaatgaacttatccgagcactctctaatgcttctcccaggagatgtggaattctcaatcaactttctcccttgctacatcccggaaccatgggagatgatcaatctgtctccccccgaatttgcaattttccatctaaaagcatccagagaatttatagctaaaccgaacagctatacgatacaatacttcgacgccatgtacgtttgcgccgatgaactgaaggctctcatgattccctcaaaagaaattgccaaactcggcttattgatcgaaacctacatctggaacaaagatacaattccctccataaagatcttcaactccacacgcaaaactatctacatccctacaggcatctgcatcgccaggataatttttacttgcggacatttttgcctcagtttaatgcctgaacgtgcaataaaccggctacaggtactagacgccaattcctctttcttgtttcattatgccgcctccaataacgcttaa

SEQ ID NO: 16154 - DNA, 72 bp, unidentified
  misc_feature 1..72: note = Synthetic
  source 1..72: mol_type = other DNA
atgtggacatcaatgaactttggactacagacatatctgaagacaaaacgcacgacgtgtggccggctgtaa

SEQ ID NO: 16155 - DNA, 66 bp, unidentified; identical to SEQ ID NO: 9697
  misc_feature 1..66: note = Synthetic
  source 1..66: mol_type = other DNA

SEQ ID NO: 16156 - DNA, 66 bp, unidentified; identical to SEQ ID NO: 9698
  source 1..66: mol_type = other DNA
  misc_feature 1..66: note = Synthetic

SEQ ID NO: 16157 - DNA, 45 bp, unidentified; identical to SEQ ID NO: 9699
  source 1..45: mol_type = other DNA
  misc_feature 1..45: note = Synthetic

SEQ ID NO: 16158 - DNA, 162 bp, unidentified; identical to SEQ ID NO: 9700
  source 1..162: mol_type = other DNA
  misc_feature 1..162: note = Synthetic

SEQ ID NO: 16159 - DNA, 90 bp, unidentified
  source 1..90: mol_type = other DNA
  misc_feature 1..90: note = Synthetic
ctgcagatacctctggggacttctatttacatccaagccttcgcaggcgaaaacgtaaacgcacttatttatgatatttctttcagatga

SEQ ID NO: 16160 - DNA, 45 bp, unidentified; identical to SEQ ID NO: 9702
  misc_feature 1..45: note = Synthetic
  source 1..45: mol_type = other DNA

SEQ ID NO: 16161 - DNA, 84 bp, unidentified
  source 1..84: mol_type = other DNA
  misc_feature 1..84: note = Synthetic
agggttactcaatatatgaaaattatggcaatattaaggaatttaatgcgacgcatgcagcattcgaatattcgaaatctatag

SEQ ID NO: 16162 - DNA, 45 bp, unidentified; identical to SEQ ID NO: 9702
  misc_feature 1..45: note = Synthetic
  source 1..45: mol_type = other DNA

SEQ ID NO: 16163 - DNA, 108 bp, unidentified
  source 1..108: mol_type = other DNA
  misc_feature 1..108: note = Synthetic
ctgcggtgtgtttactttttatccagggttactcaatatatgaaaattatggcaatattaaggaatttaatgctactcatgcagcattcgaatattcaaaatctatag

SEQ ID NO: 16164 - DNA, 2100 bp, unidentified
  misc_feature 1..2100: note = Synthetic
  source 1..2100: mol_type = other DNA
atgaacccatcggagatgcaaagaaaagcacctccgcggagacggagacaccgcaatcgagcaccgttgactcacaagatgaacaaaatggtgacgtcagaagaacagatgaagttgccatccaccaagaaggcagagccgccgacttgggcacaactaaagaagctgacgcagttagctacaaaatatctagagaacacaaaggtgacacaaaccccagagagtatgctgcttgcagccttgatgattgtatcaatggtggtaagtctccctatgcctgcaggagcagctgcagctaactatacctactgggcctatgtgcctttcccgcccttaattcgggcagtcacatggatggataatcctatagaaatatatgttaatgatagtgtatgggtacctggccccacagatgattgctgccctgccaaacctgaggaagaagggatgatgataaatatttccattgggtatcgttatcctcctatttgcctagggagagcaccaggatgtttaatgcctgcagtccaaaattggttggtagaagtacctactgtcagtcccatcagtagattcacttatcacatggtaagcgggatgtcactcaggccacgggtaaattatttacaagacttttcttatcaaagatcattaaaatttagacctaaagggaaaccttgccccaaggaaattcccaaagaatcaaaaaatacagaagttttagtttgggaagaatgtgtggccaatagtgcggtgatattacaaaacaatgaattcggaactcttatagattgggcacctcgaggtcaattctaccacaattgctcaggacaaactcagtcgtgtccaagtgcacaagtgagtccagctgttgatagcgacttaacagaaagtttagacaaacataagcataaaaaattgcagtctttctacccttgggaatggggagaaaaaggaatctctaccgcaagaccaaaaataataagtcctgtttctggtcctgaacatccagaattatggaggcttactgtggcctcacaccacattagaatttggtctggaaatcaaactttagaaacaagagatcgtaagccattttatactatcgacctaaattccagtctaacagttcctttacaaagttgcgtaaagcccccttatatgctagttgtaggaaatatagttattaaaccagactcccagactataacctgtgaaaattgtagattgcttacttgcattgattcaacttttaattggcaacaccgtattctgctggtgagagcaagagagggcgtgtggatccctgtgtccatggaccgaccgtgggaggcctcaccatccgtccatattttgactgaagtattaaaaggtgttttaaatagatccaaaagattcatttttactttaattgcagtgattatgggattaattgcagtcacagctacggctgctgtagcaggagttgcattgcactcttctgttcagtcagtaaactttgttaatgattggcaaaataattctacaagattgtggaattcacaatctagtattgatcaaaaattggcaaatcaaattaatgatcttagacaaactgtcatttggatgggagacaggctcatgagcttagaacatcgtttccagttacaatgtgactggaatacgtcagatttttgtattacaccccaaatttataatgagtctgagcatcactgggacatggttagatgccatctacagggaagagaagataatctcactttagacatttccaaattaaaagaacaaatttttgaagcatcaaaagcccatttaaatttggtgccaggaactgaggcaattgcaggagttgctgatggcctcgcaaatcttaacactgtcacttgggttaagaccattggaagtactacaattataaatctcatattaatccttgtgtgcctgttttgtctgttgttagtctacaggtgtacccaacagctccgacgagacagcgaccatcgagaacgggccatgatgacgatggtggttttgtcgaaaagaaaagggggaaatgtggggaaaagcaagagagatcagattgttactgtgtctgtgtag

SEQ ID NO: 16165 - DNA, 1362 bp, unidentified
  source 1..1362: mol_type = other DNA
  misc_feature 1..1362: note = Synthetic
acgatgtgcgcgcgacgtgtgtccgagatcacggcgtgcgcgagacttgtgttgagccttctcgtcgagagcgcgttcacaaaggggtccgcgtctgtcgtggaggaaacacccgcgctcgacgcgtgcatggcacgcgagcaatggcggcctgccctgctcatgcgcaagcagctcggcgagagcgcgcagttgtgcgtaccctggcagccgagccgggggaacacgcttgagtggtactacctctttgagagttctgcgcccgcggagaaagacgtcccgcagtgtgcccccggaggtactgccgccaggaaaacggaaacagcaccgttgccgcggcagtggccgtcgggcgccaacacgagcgcgcgccccgcaagcgtctgcaagtactttcgcccgcttgtaaacgtgtccggactggccacgcgcacacacacgttttccatgagcgagcagacttgtctttacgtgacagatctagggcgggacgacagtggcgtgtacgtagccttggcgcggaaagcaagcacggcgacgttgctcctaataacccgcgtgctcgtacgcgctcgcgtgccaatggtacgtgtacgcacgcaggtactgctggcagcgtacggccgctgcgtgatcgaagtggcctgcgaggcgagagagctctctgcaggcgcgagcttgtttctgggagacagagttagcgggagctccgcgatcacgtcttgggagtactaccgcaacacgacggctcgcgtcttgacacaccaggaggcggtgtctactctctcgcaggccctctccgtgtccatgcaactacactggagctcgaacgcgtttccgaagcgcgacgggctctatacgtgcgtggtttctttcggcggacaggccgtctccgcaagtgctcgagtcgacagcgagtgcgcgcgtgcgttagagggcgctcccaaactcgaggagagaaaaggccaggaccaagacggaggggacggcgtccacaagttggagccgtgcaagagcaagtgcccaccatgtccgacacgtcttccctgcaagggttgcgatggcctgccgtatgcacttgtcgcgatcgtcttcctgacaacgttgctgctaatcgccggcgggattgtcatcaccttgtgcctatggggacgcgaggggggcacaagctgcgccgccaacaccgacgccgacactgtgacgctagattacggccctctcgagttcgagaagccctcgaagtcgagttcgcgagcacgcagagcactcttggcaggggaaggcgcgctcgggctctgcggcgaagaagaagagccggcttcccaggacctcgacgccgttaccaccgtacacgatttctag

SEQ ID NO: 16166 - DNA, 60 bp, unidentified
  source 1..60: mol_type = other DNA
  misc_feature 1..60: note = Synthetic
atgagaccaaatcagatgtactggcagtgccaggggcagatgttccatcaaactccatga

SEQ ID NO: 16167 - DNA, 36 bp, unidentified; identical to SEQ ID NO: 9715
  source 1..36: mol_type = other DNA
  misc_feature 1..36: note = Synthetic

SEQ ID NO: 16168 - DNA, 36 bp, unidentified; identical to SEQ ID NO: 9715
  source 1..36: mol_type = other DNA
  misc_feature 1..36: note = Synthetic

SEQ ID NO: 16169 - DNA, 54 bp, unidentified; identical to SEQ ID NO: 9716
  source 1..54: mol_type = other DNA
  misc_feature 1..54: note = Synthetic

SEQ ID NO: 16170 - DNA, 1464 bp, unidentified
  misc_feature 1..1464: note = Synthetic
  source 1..1464: mol_type = other DNA
attctgtatttcgggtgtaacatggcaatagattacgcacaaatttcttgtaatttggcttctattatagaagaggactcggtctttttatttctaatagacaaattaaacaatctggacatttcaagaaggaaaatttcatttaattttatccgtctgtgttatacttattatatcttaataaagtttaattctcgcttcaaagataccttcttagccagatcgttcattgattatatgcatcaaaacatatcagattttatcgatgagaatgttgagctatctgatttatatagcaatatttatgtccgcttacaagatgcgagtccaaaagttgttaagaatctatttaaaatattagaacgagagacaagaggacagtcaacaaatccactctggcacgctatgcgaaaaaattgcatcacggcaactaaaatttatgacatctatatctctaaatctttttcgggtatacaggagcattcttatttaggagatgcggttttatatggaattaaacatgaacgcatcatagaacacctgttaaagacattctttgtgaaaaagccctggatatctaaaacacttggtttattattagatccttcatctggagtgtttggtgcatccatagattcttattatggaatctcttttaatgacaacaacctgatagaagtaggggataaagttgttatatttgaattgaaatttagatataaatatctgagagaaaaaaacgatctatttgtttccgagctgttacaaaatccgtcagaaattgctttagctaaattcatcttatcacatccaataccagctatagagtatagagaaaatggaaagatgccctcggcaagagaatatttaatcactaacaatcctctatacgattctggtaaaaaacgtcgtgcttgcttgactcccaaaaatttgacgttcgacattacacgactaattcccatgaacgaaaaaaatgtgtcaacggcaattatttttgatgtcgttaaagactgtatattaaacacattggttgcataccaaaaagctatttttactattgatgcttttataaatcctaggcatagatattattttcagagtattttacagcaatatgtaatgactcaattttatatacaggatcacgataatccagaaaatattgaaaaagagaatttaccctcggtttatattgtatctgccatatttcgaaaaagagaagacgacgaaaaaaactgtcgcttgctaattgaggacacagaatatttagaagaagaaatccctttaattttattgattactccaattactattgacgctgaatttacttcacgagtaatcaaagatatatgctgtatctgggaaaataaaattgcacaacagacaaatttaaaaatatgggctcaaagtgctgtaagacaatacatggcggcatcttcagcaaggccgaagacaccttag

SEQ ID NO: 16171 - DNA, 201 bp, unidentified
  source 1..201: mol_type = other DNA
  misc_feature 1..201: note = Synthetic
atggaatatgccgcaaacaatctaagtatgagtgtgttcagtccaataatattaaaggactgtacatttatgcaaacaacagttaccataactcaaatcttgccaggttctaaggaagcaataattttcccagtttacgatataggcaaattattatcagctcttgttttttcagagaacggtgtacttttgaaactataa

SEQ ID NO: 16172 - DNA, 321 bp, unidentified
  misc_feature 1..321: note = Synthetic
  source 1..321: mol_type = other DNA
attatctttttatccgctatcgtaacctgcctagtatatacaacctttggtaaaacgtgtcctgcggattactatcttgaacctgaagatggtttatgtacggcatgtgttacttgtttaagcaatatggtagagacacaatcatgtggaccggataaaccacgaaaatgtcaatgtggtccaggattaaaatgtacggtgcctgccgtcaatagttgtgcaagatgtactcctgataccactacaaaaaaagtacaaaaagaacaatgctgtaccactccggataatacaaaactttgttatcataaatactcatcatga

SEQ ID NO: 16173 - DNA, 1146 bp, unidentified
  source 1..1146: mol_type = other DNA
  misc_feature 1..1146: note = Synthetic
ctgtcacctggaaaaatgtacagcgtaatttcagaaaagatctctgaaacgattaccctacagagacaaacgagctcaagatacattgaatttttcgtctttcgaaacgtggacatcaatgaactttggactacagacatatctgaagacaaaacgcacgatgtgtggccagctataaatgagaaatcatttaaaaaatttctagaaaacgaactaacctcttatcaacgcccaatctcgcttctaggtattccgcaaaatggaacagtgtcgaagacctgcaaaagagaaaagcaaagagaaaccgattgtgttaactatgtaaggaaacatggcaacccagtaactttctacccaagacaccgcgcaaaaagaaatgcaaatacggacacttgtatttcggaagaaccatctatcttagtaagccatcacaggaatagtaaaatggacgtttttatggacgccaacaaaatcacactcgtaaatagagaactcatatgggtgccgcacgatcaagttcgaatcgtaaaactagatatttccctgtgcatcccggatggtttcttcggagtcattattggccatagcaacgacgtattctgcgaatgcatcactgaaattataaccgacgaaaccgacatttcagtttttctaatgaacttatccgagcactccctaatgcttctcccaggagatgtcgaattctcaatcaactttctcccttgctacatcccggaaccatgggagatgatcaatctgtctccccccgaatctgcagttttccatctaaagacatgcagagaatttataattaaaccgaacagctatacgatacaatgcttcgacgccatgtacgtttgcgccgatgaactaaaggctctcatgattccctccaaagaaattatcaaactcggcttattgattgaaacctacatctggaacaaagacacaattccctccataaagatcttcaactctacacgcaaaactatctacatccctacaggcatctgcatcgccagaataatttttacttgcggacatttctgcctcagtttaatgcctgaacgcgcaataaaccggctacaggtactagacgccagttcctttttcttgtttcattatgccgccttcagtaacgcttga

SEQ ID NO: 16174 - DNA, 60 bp, unidentified
  misc_feature 1..60: note = Synthetic
  source 1..60: mol_type = other DNA
atgaactttggactacagacatatctgaagacaaaacgcacgatgtgtggccagctataa

SEQ ID NO: 16175 - DNA, 1551 bp, unidentified
  misc_feature 1..1551: note = Synthetic
  source 1..1551: mol_type = other DNA
atgaggcgcgcggtggtgtcctctcctcctccctcgtacgagagcgtgatggcgcaggcaaccctggaggttccgtttgtgcctccgcggtatatggctcctacggagggcagaaacagcattcgttactcggagctggctccgcagtacgacaccactcgcgtgtacttggtggacaacaagtcggcggacatcgcttccctgaactaccaaaacgaccacagcaacttcctgaccacggtggtgcagaacaacgatttcaccaccgccgaggccagcacgcagacgataaattttgacgagcggtcccggtggggcggtgatctgaagaccattctgcacaccaacatgcccaatgtgaacgagtacatgttcaccagcaagtttaaggcgcgggtgatggtggctaggaagcacccagaaggggtagacaacacagatttgagtcaggataagcttgaatatcagtggtttgagtttaccctgcccgagggcaatttttccgagaccatgaccatagacctgatgaacaacgccatcttggaaaactacttgcaagtggggcgtcaaaatggcgtgctggagagcgatattggagtcaagtttgacagcagaaatttcaagctgggctgggacccggtaactaagctggtgatgccgggggtctacacctacgaggccttccacccggacgtggtgctgctgccgggctgcggggtggacttcaccgagagccgcctgagcaacctcctgggcattcgcaagaagcaacctttccaagagggtttcaggatcatgtatgaggatctagaaggcggcaacatccccgcacttctaaatgtaaccaagtacttggaaagcaagaagacgctacagaaggcagtggaaaatgctgctaaagttaatgctcctgcaagaggagatagcagtgtcccaagagctgtagaaaaggctgctgagaaggagctagagattgttcccattgaaaaggatgacagcaacagaagttataatattatacctggaaccacggacaccctgtaccgcagttggtacctgtcctatacctacggggaccccaaaaagggggtacagtcgtggacgctgctcaccaccccggacgttacctgcggcgcggagcaagtttactggtcgctgccggacctcatgcaagaccccgtcacctttcgctccacccagcaagtcagcaactaccccgtggttggcgccgagctcatgcccttccgcgccaaaagcttttacaacgatctcgccgtctactcccagctcatccgcagctacacctccctcacccacgtcttcaaccgcttccccgacaaccagatcctgtgccgcccgcccgcgcccaccatcaccaccgttagtgaaaacgtgcctgctctcacagatcacgggacgctaccgctgcgcagcagtatccgcggagtccagcgagtgaccgttactgacgcccgtcgccgcacctgtccctacgtctacaaggccctgggcatagtcgcgccgcgcgtgctctccagtcgcaccttctag

SEQ ID NO: 16176 - DNA, 870 bp, unidentified
  source 1..870: mol_type = other DNA
  misc_feature 1..870: note = Synthetic
acgactgttcgtcgagcacccgtcatggtacagatccagtttcaccaaggcgagccactcggccataagaaagagaaacccccacccgtgtcgccgccgtcaccaccgccgatccgtcgagtcaccgtaatcaccaaagatgaagacaccctgcggagcgttcaacactttctctggatggtacgtctctacggcaccgtcgtgttccagaccagcgccaccatagccactaccatccttttcatgctcataccgtggcgcgtgacaaccccctacctgcgcgatacactgcccttctggagcacactgctaccctgtgctctgcgttgccacgcgtactggctggaacgtcagcgccgacccgggaccctgatgctggtcatggtatataccaccctcactacgatatccgtgtccaccatcgggctgtgtttcgatcgcaccgtggtaatccaggcctatgtcctgtcatccatgctctgcgtctggtgtacgggcctagcctggctcatggcctggaacatgcaacgacggttagccatcctctgtttgctaagtttcatgcttcccatactctggctcttcatcgccgtgcagtcctgggaaccataccaacgcatcattttagcactgactgtgagcttcatctacggcctcaagatcgtgcttatccgcgacacattaacggtgctttatcgctcaccgtcaaattgctacacggacggcgacctgctgcgcaccgctatgctgctatatatggaccaagtcattatgtttctgctcgtggtagtacccctgacggcccccatctggtatccaaactacgccggggccctaggccgcacggcacactggctttttcataaataa

SEQ ID NO: 16177 - DNA, 60 bp, unidentified; identical to SEQ ID NO: 9734
  source 1..60: mol_type = other DNA
  misc_feature 1..60: note = Synthetic

SEQ ID NO: 16178 - DNA, 93 bp, unidentified; identical to SEQ ID NO: 9735
  misc_feature 1..93: note = Synthetic
  source 1..93: mol_type = other DNA

SEQ ID NO: 16179 - DNA, 210 bp, unidentified
  misc_feature 1..210: note = Synthetic
  source 1..210: mol_type = other DNA
gtggtcctaggcaatgcagcaggtctaggcataatgggagagtatagaggtacgccaagaaaccaggatctttatgatgcagccaaagcatatgcagagcaactcaaagaaaatggagtaataaactacagtgtattagacttaacagcagaagaattggaagccataaagaatcaactcaaccctaaagaagatgatgtagagctttaa

SEQ ID NO: 16180 - DNA, 177 bp, unidentified
  misc_feature 1..177: note = Synthetic
  source 1..177: mol_type = other DNA
atgggagaatacagaggtacaccaaggaatcaagatctatatgatgctgcaaaagcatatgctgaacaactcaaagaaaatggtgtgattaactacagtgtattagacttgacagcagaagaactagaggctatcaaacatcagcttaatccaaaagataatgatgtagagctttga

SEQ ID NO: 16181 - DNA, 237 bp, unidentified
  source 1..237: mol_type = other DNA
  misc_feature 1..237: note = Synthetic
aagaactccccaccatcactccctacttgcaggagacgagtccagaacgggccccgtcacttcctcccaaaaagaagttgcgcaagaatgttcaagtgccggatcgcgttccagttttgcctccgtctcccgaagtggttccagacagcgaggaggaagaagaagaggtggtgtacaccgggttcagtcaccccggcgtgcaggtcgttcaaaaggccagtggcaagcgatatgtaa

SEQ ID NO: 16182 - DNA, 1422 bp, unidentified
  misc_feature 1..1422: note = Synthetic
  source 1..1422: mol_type = other DNA
atggccggccgtcagcaagaactccccaccatcactccctacttgcaggagacgagtccagaacgggccccgtcacttcctcccaaaaagaagttgcgcaagaatgttcaagtgccggatcgcgttccagttttgcctccgtctcccgaagtggttccagacagcgaggaggaagaagaagaggtggtgtacaccgggttcagtcaccccggcgtgcaggtcgttcaaaaggccagtggcaagcgatatgtaagacgcttggagcccaaaggtgtgcctcccccgtcagaggaaaacaacgaggaagaagagcctagcacttccaaagctgttacatcagtggttcttaatccgcaggcagagcccttggtttccgcctgggagaaaggcatggatttaatgataaagctaatggaaaagtatcatgtggaggccgaagagaagaatggcttcaagttcctacccgaacaaagcaacgtttatcgcaaaatttgccaaacgtggcttaacgaggagcatcgcggcctccctctcaccttcaccagccacaagacatttgtggaaatgatgggacgttttttgagagcctacgtggagtcgtacgccggggtaaaaaacaatgaatgggagcccactggttgcgcgatttggcttcacggctgcaccgagcaagagggagtgctacgctgttatcatggcctggaaatgattcaaaaagagcagttggtggaaatggatgtagcgagcgagaacgctcagcgggcgttaaaggagcacccgagtcgagccaaggtggtacaaaaccggtgggggcgcagcgtggttcaactgaagaatgacgatgcccgttgttgtgtagaagacgtgagctgtgccaccaatgtgttttctgccaagtcctgcggtctgtttttctcggaaggaacaaaggctcagacggcttttttgcagatagaagcttttatgcaagccgaatatccaaaaatgcaaaacgggctaaaacgcctattaatggtgatgcgctgcgactgcctgtacaagcccaccggtgtgccccaattgggtcggcaaatgtgtaaagccacccctttcgctctaagcaatgttgacagtcttagagctgaagaagtaaccgacaaggtggctcttgccagtatccagtatccctgtgtgctggtttaccagtgcgctaaccccgtataccgcaactcccgtggtggccaaggtcccaactgtgatttcaaaatttctgcacctgaccttttgggagctttgcaacttgtacgacggctgtggggagagaacgtcgatggcccccttcctaagatgctgattccagaatttaagtggtcctctcgtttgcagtatcgcaacgtagctttgcccgccagccacggcgatggggagaaagaaccattttaa

SEQ ID NO: 16183 - DNA, 21579 bp, unidentified
  source 1..21579: mol_type = other DNA
  misc_feature 1..21579: note = Synthetic
acgtgtccattcggcgccagcagcccacccataggttgcataatggcaaagatgggcaaatacggtctcggcttcaaatgggccccagaatttccatggatgcttccgaacgcatcggagaagttgggtaaccctgagaggtcagaggaggatgggttttgcccctctgctgcgcaagaaccgaaagttaaaggaaaaactttggttaatcacgtgagggtgaattgtagccggcttccagctttggaatgctgtgttcagtctgccataatccgtgatatttttgtagatgaggatccccagaaggtggaggcctcaactatgatggcattgcagttcggtagtgccgtcttggttaagccatccaagcgcttgtctattcaggcatggactaatttgggtgtgcttcccaaaacagctgccatggggttgttcaagcgcgtctgcctgtgtaacaccagggagtgctcttgtgacgcccacgtggcctttcacctttttacggtccaacccgatggtgtatgcctgggtaatggccgttttataggctggttcgttccagtcacagccataccggagtatgcgaagcagtggttgcaaccctggtccatccttcttcgtaagggtggtaacaaagggtctgtgacatccggccacttccgccgcgctgttaccatgcctgtgtatgactttaatgtagaggatgcttgtgaggaggttcatcttaacccgaagggtaagtactcctgcaaggcgtatgctcttcttaagggctatcgcggtgttaagcccatcctgtttgtggaccagtatggttgcgactatactggatgtctcgccaagggtcttgaggactatggcgatctcaccttgagtgagatgaaggagttgttccctgtgtggcgtgactccttggatagtgaagtccttgtggcttggcacgttgatcgagatcctcgggctgctatgcgtctgcagactcttgctactgtacgttgcattgattatgtgggccaaccgaccgaggatgtggtggatggagatgtggtagtgcgtgagcctgctcatcttctcgcagccaatgccattgttaaaagactcccccgtttggtggagactatgctgtatacggattcgtccgttacagaattctgttataaaaccaagctgtgtgaatgcggttttatcacgcagtttggctatgtggattgttgtggtgacacctgcgattttcgtgggtgggttgccggcaatatgatggatggctttccatgtccagggtgtaccaaaaattatatgccctgggaattggaggcccagtcatcaggtgttataccagaaggaggtgttctattcactcagagcactgatacagtgaatcgtgagtcctttaagctctacggtcatgctgttgtgccttttggttctgctgtgtattggagcccttgcccaggtatgtggcttccagtaatttggtcttctgttaagtcatactctggtttgacttatacaggagtagttggttgtaaggcaattgttcaagagacagacgctatatgtcgttctctgtatatggattatgtccagcacaagtgtggcaatctcgagcagagagctatccttggattggacgatgtctatcatagacagttgcttgtgaataggggtgactatagtctcctccttgagaatgtggatttgtttgttaagcggcgcgctgaatttgcttgcaaattcgccacctgtggagatggtcttgtacccctcctactagatggtttagtgccccgcagttattatttgattaagagtggtcaagctttcacctctatgatggttaattttagccatgaggtgactgacatgtgtatggacatggctttattgttcatgcatgatgttaaagtggccactaagtatgttaagaaggttactggcaaactggccgtgcgctttaaagcgttgggtgtagccgttgtcagaaaaattactgaatggtttgatttagccgtggacattgctgctagtgccgctggatggctttgctaccagctggtaaatggcttatttgcagtggccaatggtgttataacctttgtacaggaggtgcctgagcttgtcaagaattttgttgacaagttcaaggcatttttcaaggttttgatcgactctatgtcggtttctatcttgtctggacttactgttgtcaagactgcctcaaatagggtgtgtcttgctggcagtaaggtttatgaagttgtgcagaaatctttgtctgcatatgttatgcctgtgggttgcagcgaagccacttgtttggtgggtgagattgaacctgcagtttttgaagatgatgttgttgatgtggttaaagccccattaacatatcaaggctgttgtaagccacccacttctttcgagaagatttgtattgtggataaattgtatatggccaagtgtggtgatcaattttaccctgtggttgttgataacgacactgttggcgtgttagatcagtgctggaggtttccctgtgcgggcaagaaagtcgagtttaacgacaagcccaaagtcaggaagataccctccacccgtaagattaagatcaccttcgcactggatgcgacctttgatagtgttctttcgaaggcgtgttcagagtttgaagttgataaagatgttacattggatgagctgcttgatgttgtgcttgacgcagttgagagtacgctcagcccttgtaaggagcatgatgtgataggcacaaaagtttgtgctttacttgataggttggcaggagattatgtctatctttttgatgagggaggcgatgaagtgatcgccccgaggatgtattgttccttttctgctcctgatgatgaagactgcgttgcagcggatgttgtagatgcagatgaaaaccaagatgatgatgctgaagactcagcagtccttgtcgctgatacccaagaagaggacggcgttgccaaggggcaggttgaggcggattcggaaatttgcgttgcgcatactggtagtcaagaagaattggctgagcctgatgctgtcggatctcaaactcccatcgcctctgctgaggaaaccgaagtcggagaggcaagcgacagggaagggattgctgaggcgaaggcaactgtgtgtgctgatgctgtagatgcctgccccgatcaagtggaggcatttgaaattgaaaaggttgaagactctatcttggatgagcttcaaactgaacttaatgcgccagcggacaagacctatgaggatgtcttggcattcgatgccgtatgctcagaggcgttgtctgcattctatgctgtgccgagtgatgagacgcactttaaagtgtgtggattctattcgcctgctatagagcgcactaattgttggctgcgttctactttgatagtaatgcagagtctacctttggaatttaaagacttggagatgcaaaagctctggttgtcttacaaggccggctatgaccaatgctttgtggacaaactagttaagagcgtgcccaagtctattatccttccacaaggtggttatgtggcagattttgcctatttctttctaagccagtgtagctttaaagcttatgctaactggcgttgtttagagtgtgacatggagttaaagcttcaaggcttggacgccatgtttttctatggggacgttgtgtctcatatgtgcaagtgtggtaatagcatgaccttgttgtctgcagatataccctacactttgcattttggagtgcgagatgataagttttgcgctttttacacgccaagaaaggtctttagggctgcttgtgcggtagatgttaatgattgtcactctatggctgtagtagagggcaagcaaattgatggtaaagtggttaccaaatttattggtgacaaatttgattttatggtgggttacgggatgacatttagtatgtctccttttgaactcgcccagttatatggttcatgtataacaccaaatgtttgttttgttaaaggagatgttataaaggttgttcgcttagttaatgctgaagtcattgttaaccctgctaatgggcgtatggctcatggtgcaggtgttgcaggtgctatagctgaaaaggcgggcagtgcttttattaaagaaacctccgatatggtgaaggctcagggcgtttgccaggttggtgaatgctatgaatctgccggtggtaagttatgtaaaaaggtgcttaacattgtagggccagatgcgcgagggcatggcaagcaatgctattcacttttagagcgtgcttatcagcatattaataagtgtgacaatgttgtcactactttaatttcggctggtatatttagtgtgcctactgatgtctccctaacttacttacttggtgtagtgacaaagaatgtcattcttgtcagtaacaaccaggatgattttgatgtgatagagaagtgtcaggtgacctccgttgctggtaccaaagcgctatcacttcaattggccaaaaatttgtgccgtgatgtaaagtttgtgacgaatgcatgtagttcgctttttagtgaatcttgctttgtctcaagctatgatgtgttgcaggaagttgaagcgctgcgacatgatatacaattggatgatgatgctcgtgtctttgtgcaggctaatatggactgtctgcccacagactggcgtctcgttaacaaatttgatagtgttgatggtgttagaaccattaagtattttgaatgcccgggcgggatttttgtatccagccagggcaaaaagtttggttatgttcagaatggttcatttaaggaggcgagtgttagccaaataagggctttactcgctaataaggttgatgtcttgtgtactgttgatggtgttaacttccgctcctgctgcgtagcagagggtgaagtttttggcaagacattaggttcagtcttttgtgatggcataaatgtcaccaaagttaggtgtagtgccatttacaagggtaaggttttctttcagtacagtgatttgtccgaggcagatcttgtggctgttaaagatgcctttggttttgatgaaccacaactgctgaagtactacactatgcttggcatgtgtaagtggccagtagttgtttgtggcaattattttgctttcaagcagtcaaataataattgctatataaatgtggcatgtttaatgctgcaacacttgagtttaaagtttcctaagtggcaatggcaagaggcttggaacgagttccgctctggtaaaccactaaggtttgtgtccttggtattagcaaagggcagctttaaatttaatgaaccttctgattctatcgattttatgcgtgtggtgctacgtgaagcagatttgagtggtgccacgtgcaatttggaatttgtttgtaaatgtggtgtgaagcaagagcagcgcaaaggtgttgacgctgttatgcattttggtacgttggataaaggtgatcttgtcaggggttataatatcgcatgtacgtgcggtagtaaacttgtgcattgcacccaatttaacgtaccatttttaatttgctccaacacaccagagggtaggaaactgcccgacgatgttgttgcagctaatatttttactggtggtagtgtgggccattacacgcatgtgaaatgtaaacccaagtaccagctttatgatgcttgtaatgttaataaggtttcggaggctaagggtaattttaccgattgcctctaccttaaaaatttaaagcaaactttttcgtctgtgctgacgactttttatttagatgatgtaaagtgtgtggagtataagccagatttatcgcagtattactgtgagtctggtaaatattatacaaaacccattattaaggcccaatttagaacatttgagaaggttgatggtgtctataccaactttaaattggtgggacatagtattgctgaaaaactcaatgctaagctgggatttgattgtaattctccctttgtggagtataaaattacagagtggccaacagctactggagatgtggtgttggctagtgatgatttgtatgtaagtcggtacttaagcgggtgcattacttttggtaaaccggttgtctggcttggccatgaggaagcatcgctgaaatctctcacatattttaatagacctagtgtcgtttgtgaaaataaatttaatgtgttgcccgttgatgtcagtgaacccacggacaaggggcctgtgcctgctgcagtccttgttaccggcgtccctggagctgatgcgtcagctggtgccggtattgccaaggagcaaaaagcctgtgcttctgctagtgtggaggatcaggttgttacggaggttcgtcaagagccatctgtttcagctgctgatgtcaaagaggttaaattgaatggtgttaaaaagcctgttaaggtggaaggtagtgtggttgttaatgatcccactagcgaaaccaaagttgttaaaagtttgtctattgttgatgtctatgatatgttcctgacagggtgtaagtatgtggtttggactgctaatgagttgtctcgactagtaaattcaccgactgttagggagtatgtgaagtggggtatgggaaagattgtaacacccgctaagttgttgttgttaagagatgagaagcaagagttcgtagcgccaaaagtagtcaaggcgaaagctattgcctgctattgtgctgtgaagtggtttctcctctattgttttagttggataaagtttaatactgataataaggttatatacaccacagaagtagcttcaaagcttactttcaagttgtgctgtttggcctttaagaatgccttacagacgtttaattggagcgttgtgtctaggggctttttcctagttgcaacggtctttttattatggtttaactttttgtatgctaatgttattttgagtgacttctatttgcctaatattgggcctctccctacgtttgtgggacagatagttgcgtggtttaagactacatttggtgtgtcaaccatctgtgatttctaccaggtgacggatttgggctatagaagttcgttttgtaatggaagtatggtatgtgaactatgcttctcaggttttgatatgctggacaactatgatgctataaatgttgttcaacacgttgtagataggcgtttgtcctttgactatattagcctatttaaattagtagttgagcttgtaatcggctactctctttatactgtgtgcttctacccactgtttgtccttattggaatgcagttattgaccacatggttgcctgaattctttatgctggagactatgcattggagtgctcgtttgtttgtgtttgttgccaatatgcttccagcttttacgttactgcgattttacatcgtggtgacagctatgtataaggtctattgtctttgtagacatgttatgtatggatgtagtaagcctggttgcttgttttgttataagagaaaccgtagtgtccgtgttaagtgtagcaccgttgttggtggttcactacgctattacgatgtaatggctaacggcggcacaggtttctgtacaaagcaccagtggaactgtcttaattgcaattcctggaaaccaggcaatacattcataactcatgaagcagcggcggacctctctaaggagttgaaacgccctgtgaatccaacagattctgcttattactcggtcacagaggttaagcaggttggttgttccatgcgtttgttctacgagagagatggacagcgtgtttatgatgatgttaatgctagtttgtttgtggacatgaatggtctgctgcattctaaagttaaaggtgtgcctgaaacgcatgttgtggttgttgagaatgaagctgataaagctggttttctcggcgccgcagtgttttatgcacaatcgctctacagacctatgttgatggtggaaaagaaattaataactaccgccaacactggtttgtctgttagtcgaactatgtttgacctttatgtagattcattgctgaacgtcctcgacgtggatcgcaagagtctaacaagttttgtaaatgctgcgcacaactctctaaaggagggtgttcagcttgaacaagttatggatacctttattggctgtgcccgacgtaagtgtgctatagattctgatgttgaaaccaagtctattaccaagtccgtcatgtcggcagtaaatgctggcgttgattttacggatgagagttgtaataacttggtgcctacctatgttaaaagtgacactatcgttgcagccgatttgggtgttcttattcagaataatgctaagcatgtacaggctaatgttgctaaagccgctaatgtggcttgcatttggtctgtggatgcttttaaccagctatctgctgacttacagcataggctgcgaaaagcatgttcaaaaactggcttgaagattaagcttacttataataagcaggaggcaaatgttcctattttaactacaccgttctctcttaaagggggcgctgtttttagtagaatgttacaatggttgtttgttgctaatttgatttgtttcattgtgttgtgggcccttatgccaacatatgcagtgcacaaatcggatatgcagttgcctttatatgccagttttaaagttatagataatggtgtgctaagggatgtgtctgttactgacgcatgcttcgcaaacaaatttaatcaatttgatcaatggtatgagtctacttttggtcttgcttattaccgcaactctaaggcttgtcctgttgtggttgctgtaatagatcaagacattggccataccttatttaatgttcctaccacagttttaagatatggatttcatgtgttgcattttataacccatgcatttgctactgatagcgtgcagtgttacacgccacatatgcaaatcccctatgataatttctatgctagtggttgcgtgttgtcatccctctgtactatgcttgcgcatgcagatggaaccccgcatccttattgttatacagggggtgttatgcataatgcctctctgtatagttctttggctcctcatgtccgttataacctggctagttcaaatggttatatacgttttcccgaagtggttagtgaaggcattgtgcgtgttgtgcgcactcgctctatgacctactgcagggttggtttatgtgaggaggccgaggagggtatctgctttaattttaatcgttcatgggtattgaacaacccgtattatagggccatgcctggaactttttgtggtaggaatgcttttgatttaatacatcaagttttaggaggattagtgcggcctattgatttctttgccttaacggcgagttcagtggctggtgctatccttgcaattattgtcgttttggctttctattatttaataaagcttaaacgtgcctttggtgactacactagtgttgtggttatcaatgtaattgtgtggtgtataaattttctgatgctttttgtgtttcaggtttatcccacattgtcttgtttatatgcttgtttttatttctacacaacgctttatttcccttcggagataagtgttgttatgcatttgcaatggcttgtcatgtatggtgctattatgcccttgtggttttgcattatttacgtggcagtcgttgtttcaaaccatgcattgtggttgttctcttactgccgcaaaattggtaccgaggttcgtagtgacggcacatttgaggaaatggcccttactacctttatgattactaaagaatcttattgtaagttgaaaaattctgtttctgatgttgcttttaacaggtacttgagtctttataacaagtatcgttattttagtggcaaaatggatactgccgcttatagagaggctgcctgttcacaactggcaaaggcaatggaaacatttaaccataataatggtaatgatgttctctatcagcctccaaccgcctctgttactacatcatttttacagtctggtatagtgaagatggtgtcgcccacctctaaagtggagccttgtattgttagtgttacttatggtaacatgacacttaatgggttgtggttggatgataaagtttattgcccaagacatgttatctgttcttcagctgacatgacagaccctgattatcctaatttgctttgtagagtgacatcaagtgatttttgtgttatgtctggtcgtatgagccttactgtaatgtcttatcaaatgcagggctgccaacttgttttgactgttacactgcaaaatcctaacacgcctaagtattccttcggtgttgttaagcctggtgagacatttactgtactggctgcatacaatggcagacctcaaggagccttccatgttacgcttcgtagtagccataccataaagggctcctttctatgtggatcctgcggttctgtaggatatgttttaactggcgatagtgtacgatttgtttatatgcatcagctagagttgagtactggttgtcataccggtactgactttagtgggaacttttatggtccctatagagatgcgcaagttgtacaattgcctgttcaggattatacgcagactgttaatgttgtagcttggctttatgctgctatttttaacagatgcaactggtttgtgcaaagtgatagttgttccctggaggagtttaatgtttgggctatgaccaatggttttagctcaatcaaagccgatcttgtcttggatgcgcttgcttctatgacaggcgttacagttgaacaggtgttggccgctattaagaggctgcattctggattccagggcaaacaaattttaggtagttgtgtgcttgaagatgagctgacaccaagtgatgtttatcaacaactagctggtgtcaagctacagtcaaagcgcacaagagttataaaaggtacatgttgctggatattggcttcaacgtttttgttctgtagcattatctcagcatttgtaaaatggactatgtttatgtatgttactacccatatgttgggagtgacattgtgtgcactttgttttgtaagctttgctatgttgttgatcaagcataagcatttgtatttaactatgtatattatgcctgtgttatgcacactgttttacaccaactatttggttgtgtacaaacagagttttagaggtctagcttatgcttggctttcacactttgtccctgctgtagattatacatatatggatgaagttttatatggtgttgtgttgctagtagctatggtgtttgttaccatgcgtagcataaaccacgacgtcttttctattatgttcttggttggtagacttgtcagcctggtatccatgtggtattttggagccaatttagaggaagaggtactattgttcctcacatccctatttggcacgtacacatggactactatgttgtcattggctaccgctaaggttattgctaaatggttggctgtgaatgtcttgtacttcacagacgtaccgcaaattaaattagttcttttgagctacttgtgtattggttatgtgtgttgttgttattggggaatcttgtcactccttaatagcatttttaggatgccattgggcgtctacaattataaaatctccgttcaggagttacgttatatgaatgctaatggcttgcgcccacctagaaatagttttgaggccctgatgcttaattttaagctgttgggaattggtggtgtgccagtcattgaagtatctcaaattcaatcaagattgacggatgttaaatgtgctaatgttgtgttgcttaattgcctccagcacttgcatattgcatctaattctaagttgtggcagtattgtagtactttgcacaatgaaatactggctacatctgatttgagcgtggccttcgataagttggctcaactcttagttgttttatttgctaatccagcagcagtggatagcaagtgccttgcaagtattgaagaagtgagcgatgattacgttcgcgacaatactgtcttgcaagccttacagagtgaatttgttaatatggctagcttcgttgagtatgaacttgctaagaagaatctagatgaggctaaggctagcggctctgccaatcaacagcagattaagcagctagagaaggcgtgtaatattgctaagtcagcatatgagcgcgacagagctgttgctcgtaagctggaacgtatggctgatttagctcttacaaacatgtataaagaagctagaattaatgataagaagagtaaggtagtgtctgcattgcaaaccatgctctttagtatggtgcgtaagctagataaccaagctcttaattctattttagataatgcagttaagggttgtgtacctttgaatgcaataccatcattgacttcgaacactctgactataatagtgccagataagcaggtttttgatcaggttgtggataatgtgtatgtcacctatgctgggaatgtatggcatatacagtttattcaagatgctgatggtgctgttaaacaattgaatgagatagatgttaattcaacctggcctctagtcattgctgcaaataggcataatgaagtgtctactgttgttttgcagaacaatgagttgatgcctcagaagttgagaactcaggttgtcaatagtggctcagatatgaattgtaatactcctacccagtgttactataatactactggcacgggtaagattgtgtatgctatacttagtgactgtgatggtctcaagtacactaagatagtaaaagaagatggaaattgtgttgttttggaattggatcctccctgtaagttttctgttcaggatgtgaagggccttaaaattaagtacctttactttgtgaaggggtgtaatacactggctagaggctgggttgtaggcaccttatcctcgacagtgagattgcaggcgggtacggcaactgagtatgcctccaactctgcaatactgtcgctgtgtgcgttttctgtagatcctaagaaaacgtacttggattatataaaacagggtggagttcccgttactaattgtgttaagatgttatgtgaccatgctggcactggtatggccattactattaagccggaggcaaccactaatcaggattcttatggtggtgcttccgtttgtatatattgccgctcgcgtgttgaacatccagatgttgatggattgtgcaaattacgcggcaagtttgtccaagtgcccttaggcataaaagatcctgtgtcatatgtgttgacgcatgatgtttgtcaggtttgtggcttttggcgagatggtagctgttcctgtgtaggcacaggctcccagtttcagtcaaaagacacgaactttttaaaccggattcggggtacaagtgtaaatgcccgtcttgtaccctgtgccagtggcttggacactgatgttcaattaagggcatttgacatttgtaatgctaatcgagctggcattggtttgtattataaagtgaattgctgccgcttccagcgtgtagatgaggacggcaacaagttggataagttctttgttgttaaaagaactaatttagaagtgtataataaggagaaagaatgctatgagttgacaaaagaatgcggtgttgtggctgaacacgagttcttcacatttgatgtggagggaagtcgggtaccacacatagtccgtaaagatctttcaaagtttactatgttagatctttgctatgcattgcgtcattttgaccgcaatgattgttcaactcttaaggaaattctccttacatatgctgagtgtgaagagtcctacttccaaaagaaggactggtatgattttgttgagaatcctgatataattaatgtgtataaaaagcttggtcctatatttaatagagccctgcttaacactgccaagtttgcagacgcattagtggaggcaggcttagtaggtgttttaacacttgataatcaagatttatatggtcaatggtatgactttggagattttgtcaagacagtacctggttgtggtgttgccgtggcagactcttattattcatatatgatgccaatgctgactatgtgtcatgcgttggatagtgagttgtttgttaatggtacttatagggagtttgaccttgttcagtatgattttactgatttcaagctagagctcttcactaagtattttaagcattggagtatgacctaccacccgaacacctgtgagtgcgaggatgacaggtgcattattcattgcgccaattttaatatactttttagtatggtcttacctaagacctgttttgggcctcttgttaggcagatatttgtggatggtgttcctttcgttgtgtcgatcggttaccattataaagaattaggtgttgttatgaatatggatgtggatacacatcgttatcgcttgtctcttaaggacttgcttttgtatgctgcagaccctgcccttcatgtggcgtctgctagtgcactgcttgatttgcgcacatgttgttttagcgttgcagctattacaagtggcgtaaaatttcaaacagttaaacctggaaattttaatcaggatttttatgagtttattttgagtaaaggcctgcttaaagaggggagctccgttgatttgaagcacttcttctttacgcaggatggtaatgctgctattactgattataattattacaagtataatctacccaccatggtggatattaagcagttgttgtttgttttagaagttgttaataagtattttgagatctatgagggtgggtgtatacccgcaacacaggtcattgttaataattatgataagagtgctggctatccatttaataaatttggaaaggccaggctctattatgaggcattatcatttgaggagcaggatgaaatttatgcgtataccaaacgcaatgtcctgccgaccctaactcaaatgaatcttaaatatgctattagtgctaagaatagggcccgcaccgttgctggtgtctctattctcagtactatgactggcagaatgtttcatcaaaagtgtctaaagagtatagcagctactcgcggtgttcctgtagttataggcaccacgaagttctatggcggttgggatgatatgttacgccgccttattaaagatgttgatagtcctgtactcatgggttgggactatcctaaatgtgatcgtgctatgccaaacatactgcgtattgttagtagtttggtgctagcccgtaaacatgattcgtgctgttcgcatacggatagattctatcgtcttgcgaacgagtgcgcccaagttttgagtgaaattgttatgtgtggtggttgttattatgttaaaccaggtggcactagtagtggggatgcaaccactgcttttgctaattctgtgtttaacatttgtcaagctgtttccgccaatgtatgctcgcttatggcatgcaatggacacaaaattgaagatttgagtatacgcgagttacaaaagcgcctatactctaatgtctatcgtgcggaccatgttgaccccgcatttgttagtgagtattatgagtttttaaataagcattttagtatgatgattttgagtgatgatggtgttgtgtgttataattcagagtttgcgtccaagggttatattgctaatataagtgcctttcaacaggtattatattatcaaaataatgtgtttatgtctgaggccaaatgttgggtagaaacagacatcgaaaagggaccgcatgaattttgttctcaacatacaatgctagtcaagatggatggtgatgaagtctaccttccataccctgatccttcgagaatcttaggagcaggctgttttgttgatgatttattaaagactgatagcgttctcttgatagagcgtttcgtaagtcttgcaattgatgcttatcctttagtataccatgagaacccagagtatcaaaatgtgttccgggtatatttagaatatataaagaagctgtacaatgatctcggtaatcagatcctggacagctacagtgttattttaagtacttgtgatggtcaaaagtttactgatgagaccttttacaagaacatgtatttaagaagtgcagtgctgcaaagcgttggtgcctgcgttgtctgtagttctcaaacatcattacgttgtggcagttgcatacgcaagcctttgctgtgttgcaaatgcgcctatgatcatgttatgtccactgatcataaatatgtcctgagtgtgtcaccatatgtgtgtaattcaccgggatgtgatgtaaatgatgttaccaaattgtatttaggtggtatgtcatattattgtgaggaccataaaccacagtattcattcaaattggtgatgaatggtatggtttttggtttatataaacaatcttgtactggttcgccctacatagaggattttaataaaatagctagttgcaaatggacagaagtcgatgattatgtgctagctaatgaatgcaccgaacgccttaaattgtttgccgcagaaacgcagaaggccacagaagaggcctttaagcaatgttatgcgtcagcaacgatccgtgagatcgtgagcgatcgggagttaattttatcttgggaaattggtaaagtgagaccaccacttaataaaaattatgtttttactggctaccattttactaataatggtaagacagttttaggtgagtatgtttttgataagagtgagttgactaatggtgtgtattatcgcgccacaaccacttataagttatctgtaggtgatgtgttcattttaacatcacacgcagtgtctagtttaagtgctcctacattagtaccgcaggagaattatactagcattcgttttgctagtgtttatagtgtgcctgagacgtttcagaataatgtgcctaattatcagcacattggaatgaagcgctattgtactgtacagggaccgcctggtactggtaagtcccatctagccattgggctagctgtttattattgtacagcgcgcgtggtgtataccgctgctagccatgctgcagttgacgcgctgtgtgaaaaggcacataaatttttaaatattaatgactgcacgcgtattgttcctgcaaaggtgcgtgtagattgttatgataaatttaaggtcaatgacaccactcgcaagtatgtgtttactacaataaatgcattacctgagttggtgactgacattattgtcgttgatgaagttagtatgcttaccaactatgagctgtctgttattaacagtcgtgttagggctaagcattatgtgtatattggagaccctgcgcagttacctgcaccacgtgtgctactgaataagggaactctagaacctagatattttaattccgttaccaagctaatgtgttgtttgggtccagatattttcttgggcacctgttatagatgccctaaggagattgtggatacggtgtcagccttggtttataataataagctgaaggctaaaaatgataatagctccatgtgctttaaggtttattataagggccagactacacatgagagttctagtgctgttaatatgcagcaaatacatttaattagtaagtttttaaaggcaaaccccagttggagtaacgccgtatttattagtccttataatagtcagaactatgttgctaagagagtcttgggattacaaacccagacagtagactcagcgcagggttctgaatatgattttgttatttattcacagactgcggaaacagcgcattctgtcaatgtaaatagattcaatgttgctattacacgtgctaagaagggtattctctgtgtcatgagtagtatgcaattatttgagtctcttaattttactacactgacgttggataagattaacaatccacgattacagtgtactacaaatttgtttaaggattgtagcaggagctatgtaggatatcacccagcccatgcaccatcctttttggcagttgatgacaaatataaggtaggcggtgatttagccgtttgccttaatgttgctgattctgctgtcacttattcgcggcttatatcactcatgggattcaagcttgacttgacccttgatggttattgtaagctgtttataactagagatgaagctatcaaacgtgttagagcctgggttggcttcgatgcagaaggtgcccatgcgatacgtgatagcattgggacaaatttcccattacaattaggcttttcgactggaattgattttgttgtcgaagccactggaatgtttgctgagagagatggttatgtctttaaaaaggcagccgcacgagctcctcctggcgaacaatttaaacaccttatcccacttatgtcaagagggcagaaatgggatgtggttcgcattagaatagtacaaatgttgtcagaccacctagtggatttggcagacagtgttgtacttgtgacgtgggctgccagctttgagctcacatgtttgcgatatttcgctaaagttggaagagaagttgtgtgtagtgtctgcaccaagcgtgcgacatgttttaattctagaactggatactatggatgctggcgacatagttattcctgtgattacctgtacaacccactaatagttgacattcaacagtggggatatacaggatctttaactagcaatcatgatcctatttgcagcgtgcataagggtgctcatgttgcatcatctgatgctatcatgacccggtgtctagctgttcatgattgcttttgtaagtctgttaattggaatttagaataccccattatttcaaatgaggtcagtgttaatacctcctgcaggttattgcagcgcgtaatgtttagggctgcgatgctatgcaataggtatgatgtgtgttatgacattggcaaccctaaaggtcttgcctgtgtcaaaggatatgattttaagttttatgatgcctcccctgttgttaagtctgttaaacagtttgtttataaatacgaggcacataaagatcaatttttagatggtttgtgtatgttttggaactgcaatgtggataagtatccagcgaatgcagttgtgtgtaggtttgacacgcgtgtgttgaacaaattaaatctccctggctgtaatggtggcagtttgtatgttaacaaacatgcattccacaccagtccctttacccgggctgccttcgagaatttgaagcctatgcctttcttttattattcagatacgccctgtgtgtatatggaaggcatggaatctaagcaggtcgattatgtcccattgagaagcgctacatgcatcacaagatgcaatttaggtggcgctgtttgtttaaaacatgctgaggagtatcgtgagtaccttgagtcttacaatacggcaaccacagcgggttttactttttgggtctataagacttttgatttttataacctttggaatacttttactaggctccaaagtttagaaaatgtagtgtataatttggtcaatgctggacactttgatggccgggcgggtgaactgccttgtgctgttataggtgagaaagtcattgccaagattcaaaatgaggatgtcgtggtctttaaaaataacacgccattccccactaatgtggctgtcgaattatttgctaagcgcagtattcggccccaccccgagcttaagctctttagaaatttgaatattgacgtgtgctggagtcacgtcctttgggattatgctaaggatagtgtgttttgcagttcgacgtataaggtctgcaaatacacagatttacagtgcattgaaagcttgaatgtactttttgatggtcgtgataatggtgctcttgaagcttttaagaagtgccggaatggcgtctacattaacacgacaaaaattaaaagtctgtcgatgattaaaggcccacaacgtgccgatttgaatggcgtagttgtggagaaagttggagattctgatgtggaattttggtttgctgtgcgtaaagacggtgacgatgttatcttcagccgtacagggagccttgaaccgagccattaccggagcccacaaggtaatccgggtggtaatcgcgtgggtgatctcagcggtaatgaagctctagcgcgtggcactatctttactcaaagcagattattatcttctttcacacctcgatcagagatggagaaagattttatggatttagatgatgatgtgttcattgcaaaatatagtttacaggactacgcgtttgaacacgttgtttatggtagttttaaccagaagattattggaggtttgcatttgcttattggcttagcccgtaggcagcaaaaatccaatctggtaattcaagagttcgtgacatacgactctagcattcattcgtactttatcactgacgagaacagtggtagtagtaagagtgtgtgcactgttattgatttattgttagatgattttgtggacattgtaaagtccctgaatctaaagtgtgtgagtaaggttgttaatgttaatgttgattttaaagatttccagtttatgttgtggtgcaatgaggagaaggtcatgactttctatcctcgtttgcaggctgctgctgactggaaacctggttatgttatgcctgtcttatataagtatttggaatcgcctctggaaagagtaaacctctggaattatggcaagccgattactttacctacaggatgtatgatgaatgttgctaagtatactcaattatgtcaatatttgagcactacaacattagcagttccggctaatatgcgtgtcttacaccttggtgccggttcggataagggtgttgcccctgggtctgcagttcttaggcagtggctaccagcgggaagtattcttgtagataatgatgtgaatccatttgtgagtgacagtgtcgcctcatattatggaaattgtataaccttaccctttgattgtcagtgggatctgataatttctgatatgtacgaccctcttactaagaacattggggagtacaacgtgagtaaagatggattctttacttacctctgtcatttaattcgtgacaagttggctctgggtggcagtgttgccataaaaataacagagttttcttggaacgctgagttatatagtttaatggggaagtttgcgttctggacaatcttttgcaccaacgtaaacgcctcttcaagtgaaggatttttgattggcataaattggttgaataagacccgtaccgaaattgacggtaaaaccatgcatgccaattatctgttttggagaaatagtacaatgtggaatggaggggcttacagtctctttgacatgagtaagttccctttgaaagcggctggtacggctgttgttagccttaaaccagaccaaataaatgacttagtcctctccttgattgagaagggcaagttattagtgcgtgatacacgcaaagaagtttttgttggcgatagcctagtaaatgtcaaataa

SEQ ID NO: 16184 - DNA, 13455 bp, unidentified
  source 1..13455: mol_type = other DNA
  misc_feature 1..13455: note = Synthetic
acgtgtccattcggcgccagcagcccacccataggttgcataatggcaaagatgggcaaatacggtctcggcttcaaatgggccccagaatttccatggatgcttccgaacgcatcggagaagttgggtaaccctgagaggtcagaggaggatgggttttgcccctctgctgcgcaagaaccgaaagttaaaggaaaaactttggttaatcacgtgagggtgaattgtagccggcttccagctttggaatgctgtgttcagtctgccataatccgtgatatttttgtagatgaggatccccagaaggtggaggcctcaactatgatggcattgcagttcggtagtgccgtcttggttaagccatccaagcgcttgtctattcaggcatggactaatttgggtgtgcttcccaaaacagctgccatggggttgttcaagcgcgtctgcctgtgtaacaccagggagtgctcttgtgacgcccacgtggcctttcacctttttacggtccaacccgatggtgtatgcctgggtaatggccgttttataggctggttcgttccagtcacagccataccggagtatgcgaagcagtggttgcaaccctggtccatccttcttcgtaagggtggtaacaaagggtctgtgacatccggccacttccgccgcgctgttaccatgcctgtgtatgactttaatgtagaggatgcttgtgaggaggttcatcttaacccgaagggtaagtactcctgcaaggcgtatgctcttcttaagggctatcgcggtgttaagcccatcctgtttgtggaccagtatggttgcgactatactggatgtctcgccaagggtcttgaggactatggcgatctcaccttgagtgagatgaaggagttgttccctgtgtggcgtgactccttggatagtgaagtccttgtggcttggcacgttgatcgagatcctcgggctgctatgcgtctgcagactcttgctactgtacgttgcattgattatgtgggccaaccgaccgaggatgtggtggatggagatgtggtagtgcgtgagcctgctcatcttctcgcagccaatgccattgttaaaagactcccccgtttggtggagactatgctgtatacggattcgtccgttacagaattctgttataaaaccaagctgtgtgaatgcggttttatcacgcagtttggctatgtggattgttgtggtgacacctgcgattttcgtgggtgggttgccggcaatatgatggatggctttccatgtccagggtgtaccaaaaattatatgccctgggaattggaggcccagtcatcaggtgttataccagaaggaggtgttctattcactcagagcactgatacagtgaatcgtgagtcctttaagctctacggtcatgctgttgtgccttttggttctgctgtgtattggagcccttgcccaggtatgtggcttccagtaatttggtcttctgttaagtcatactctggtttgacttatacaggagtagttggttgtaaggcaattgttcaagagacagacgctatatgtcgttctctgtatatggattatgtccagcacaagtgtggcaatctcgagcagagagctatccttggattggacgatgtctatcatagacagttgcttgtgaataggggtgactatagtctcctccttgagaatgtggatttgtttgttaagcggcgcgctgaatttgcttgcaaattcgccacctgtggagatggtcttgtacccctcctactagatggtttagtgccccgcagttattatttgattaagagtggtcaagctttcacctctatgatggttaattttagccatgaggtgactgacatgtgtatggacatggctttattgttcatgcatgatgttaaagtggccactaagtatgttaagaaggttactggcaaactggccgtgcgctttaaagcgttgggtgtagccgttgtcagaaaaattactgaatggtttgatttagccgtggacattgctgctagtgccgctggatggctttgctaccagctggtaaatggcttatttgcagtggccaatggtgttataacctttgtacaggaggtgcctgagcttgtcaagaattttgttgacaagttcaaggcatttttcaaggttttgatcgactctatgtcggtttctatcttgtctggacttactgttgtcaagactgcctcaaatagggtgtgtcttgctggcagtaaggtttatgaagttgtgcagaaatctttgtctgcatatgttatgcctgtgggttgcagcgaagccacttgtttggtgggtgagattgaacctgcagtttttgaagatgatgttgttgatgtggttaaagccccattaacatatcaaggctgttgtaagccacccacttctttcgagaagatttgtattgtggataaattgtatatggccaagtgtggtgatcaattttaccctgtggttgttgataacgacactgttggcgtgttagatcagtgctggaggtttccctgtgcgggcaagaaagtcgagtttaacgacaagcccaaagtcaggaagataccctccacccgtaagattaagatcaccttcgcactggatgcgacctttgatagtgttctttcgaaggcgtgttcagagtttgaagttgataaagatgttacattggatgagctgcttgatgttgtgcttgacgcagttgagagtacgctcagcccttgtaaggagcatgatgtgataggcacaaaagtttgtgctttacttgataggttggcaggagattatgtctatctttttgatgagggaggcgatgaagtgatcgccccgaggatgtattgttccttttctgctcctgatgatgaagactgcgttgcagcggatgttgtagatgcagatgaaaaccaagatgatgatgctgaagactcagcagtccttgtcgctgatacccaagaagaggacggcgttgccaaggggcaggttgaggcggattcggaaatttgcgttgcgcatactggtagtcaagaagaattggctgagcctgatgctgtcggatctcaaactcccatcgcctctgctgaggaaaccgaagtcggagaggcaagcgacagggaagggattgctgaggcgaaggcaactgtgtgtgctgatgctgtagatgcctgccccgatcaagtggaggcatttgaaattgaaaaggttgaagactctatcttggatgagcttcaaactgaacttaatgcgccagcggacaagacctatgaggatgtcttggcattcgatgccgtatgctcagaggcgttgtctgcattctatgctgtgccgagtgatgagacgcactttaaagtgtgtggattctattcgcctgctatagagcgcactaattgttggctgcgttctactttgatagtaatgcagagtctacctttggaatttaaagacttggagatgcaaaagctctggttgtcttacaaggccggctatgaccaatgctttgtggacaaactagttaagagcgtgcccaagtctattatccttccacaaggtggttatgtggcagattttgcctatttctttctaagccagtgtagctttaaagcttatgctaactggcgttgtttagagtgtgacatggagttaaagcttcaaggcttggacgccatgtttttctatggggacgttgtgtctcatatgtgcaagtgtggtaatagcatgaccttgttgtctgcagatataccctacactttgcattttggagtgcgagatgataagttttgcgctttttacacgccaagaaaggtctttagggctgcttgtgcggtagatgttaatgattgtcactctatggctgtagtagagggcaagcaaattgatggtaaagtggttaccaaatttattggtgacaaatttgattttatggtgggttacgggatgacatttagtatgtctccttttgaactcgcccagttatatggttcatgtataacaccaaatgtttgttttgttaaaggagatgttataaaggttgttcgcttagttaatgctgaagtcattgttaaccctgctaatgggcgtatggctcatggtgcaggtgttgcaggtgctatagctgaaaaggcgggcagtgcttttattaaagaaacctccgatatggtgaaggctcagggcgtttgccaggttggtgaatgctatgaatctgccggtggtaagttatgtaaaaaggtgcttaacattgtagggccagatgcgcgagggcatggcaagcaatgctattcacttttagagcgtgcttatcagcatattaataagtgtgacaatgttgtcactactttaatttcggctggtatatttagtgtgcctactgatgtctccctaacttacttacttggtgtagtgacaaagaatgtcattcttgtcagtaacaaccaggatgattttgatgtgatagagaagtgtcaggtgacctccgttgctggtaccaaagcgctatcacttcaattggccaaaaatttgtgccgtgatgtaaagtttgtgacgaatgcatgtagttcgctttttagtgaatcttgctttgtctcaagctatgatgtgttgcaggaagttgaagcgctgcgacatgatatacaattggatgatgatgctcgtgtctttgtgcaggctaatatggactgtctgcccacagactggcgtctcgttaacaaatttgatagtgttgatggtgttagaaccattaagtattttgaatgcccgggcgggatttttgtatccagccagggcaaaaagtttggttatgttcagaatggttcatttaaggaggcgagtgttagccaaataagggctttactcgctaataaggttgatgtcttgtgtactgttgatggtgttaacttccgctcctgctgcgtagcagagggtgaagtttttggcaagacattaggttcagtcttttgtgatggcataaatgtcaccaaagttaggtgtagtgccatttacaagggtaaggttttctttcagtacagtgatttgtccgaggcagatcttgtggctgttaaagatgcctttggttttgatgaaccacaactgctgaagtactacactatgcttggcatgtgtaagtggccagtagttgtttgtggcaattattttgctttcaagcagtcaaataataattgctatataaatgtggcatgtttaatgctgcaacacttgagtttaaagtttcctaagtggcaatggcaagaggcttggaacgagttccgctctggtaaaccactaaggtttgtgtccttggtattagcaaagggcagctttaaatttaatgaaccttctgattctatcgattttatgcgtgtggtgctacgtgaagcagatttgagtggtgccacgtgcaatttggaatttgtttgtaaatgtggtgtgaagcaagagcagcgcaaaggtgttgacgctgttatgcattttggtacgttggataaaggtgatcttgtcaggggttataatatcgcatgtacgtgcggtagtaaacttgtgcattgcacccaatttaacgtaccatttttaatttgctccaacacaccagagggtaggaaactgcccgacgatgttgttgcagctaatatttttactggtggtagtgtgggccattacacgcatgtgaaatgtaaacccaagtaccagctttatgatgcttgtaatgttaataaggtttcggaggctaagggtaattttaccgattgcctctaccttaaaaatttaaagcaaactttttcgtctgtgctgacgactttttatttagatgatgtaaagtgtgtggagtataagccagatttatcgcagtattactgtgagtctggtaaatattatacaaaacccattattaaggcccaatttagaacatttgagaaggttgatggtgtctataccaactttaaattggtgggacatagtattgctgaaaaactcaatgctaagctgggatttgattgtaattctccctttgtggagtataaaattacagagtggccaacagctactggagatgtggtgttggctagtgatgatttgtatgtaagtcggtacttaagcgggtgcattacttttggtaaaccggttgtctggcttggccatgaggaagcatcgctgaaatctctcacatattttaatagacctagtgtcgtttgtgaaaataaatttaatgtgttgcccgttgatgtcagtgaacccacggacaaggggcctgtgcctgctgcagtccttgttaccggcgtccctggagctgatgcgtcagctggtgccggtattgccaaggagcaaaaagcctgtgcttctgctagtgtggaggatcaggttgttacggaggttcgtcaagagccatctgtttcagctgctgatgtcaaagaggttaaattgaatggtgttaaaaagcctgttaaggtggaaggtagtgtggttgttaatgatcccactagcgaaaccaaagttgttaaaagtttgtctattgttgatgtctatgatatgttcctgacagggtgtaagtatgtggtttggactgctaatgagttgtctcgactagtaaattcaccgactgttagggagtatgtgaagtggggtatgggaaagattgtaacacccgctaagttgttgttgttaagagatgagaagcaagagttcgtagcgccaaaagtagtcaaggcgaaagctattgcctgctattgtgctgtgaagtggtttctcctctattgttttagttggataaagtttaatactgataataaggttatatacaccacagaagtagcttcaaagcttactttcaagttgtgctgtttggcctttaagaatgccttacagacgtttaattggagcgttgtgtctaggggctttttcctagttgcaacggtctttttattatggtttaactttttgtatgctaatgttattttgagtgacttctatttgcctaatattgggcctctccctacgtttgtgggacagatagttgcgtggtttaagactacatttggtgtgtcaaccatctgtgatttctaccaggtgacggatttgggctatagaagttcgttttgtaatggaagtatggtatgtgaactatgcttctcaggttttgatatgctggacaactatgatgctataaatgttgttcaacacgttgtagataggcgtttgtcctttgactatattagcctatttaaattagtagttgagcttgtaatcggctactctctttatactgtgtgcttctacccactgtttgtccttattggaatgcagttattgaccacatggttgcctgaattctttatgctggagactatgcattggagtgctcgtttgtttgtgtttgttgccaatatgcttccagcttttacgttactgcgattttacatcgtggtgacagctatgtataaggtctattgtctttgtagacatgttatgtatggatgtagtaagcctggttgcttgttttgttataagagaaaccgtagtgtccgtgttaagtgtagcaccgttgttggtggttcactacgctattacgatgtaatggctaacggcggcacaggtttctgtacaaagcaccagtggaactgtcttaattgcaattcctggaaaccaggcaatacattcataactcatgaagcagcggcggacctctctaaggagttgaaacgccctgtgaatccaacagattctgcttattactcggtcacagaggttaagcaggttggttgttccatgcgtttgttctacgagagagatggacagcgtgtttatgatgatgttaatgctagtttgtttgtggacatgaatggtctgctgcattctaaagttaaaggtgtgcctgaaacgcatgttgtggttgttgagaatgaagctgataaagctggttttctcggcgccgcagtgttttatgcacaatcgctctacagacctatgttgatggtggaaaagaaattaataactaccgccaacactggtttgtctgttagtcgaactatgtttgacctttatgtagattcattgctgaacgtcctcgacgtggatcgcaagagtctaacaagttttgtaaatgctgcgcacaactctctaaaggagggtgttcagcttgaacaagttatggatacctttattggctgtgcccgacgtaagtgtgctatagattctgatgttgaaaccaagtctattaccaagtccgtcatgtcggcagtaaatgctggcgttgattttacggatgagagttgtaataacttggtgcctacctatgttaaaagtgacactatcgttgcagccgatttgggtgttcttattcagaataatgctaagcatgtacaggctaatgttgctaaagccgctaatgtggcttgcatttggtctgtggatgcttttaaccagctatctgctgacttacagcataggctgcgaaaagcatgttcaaaaactggcttgaagattaagcttacttataataagcaggaggcaaatgttcctattttaactacaccgttctctcttaaagggggcgctgtttttagtagaatgttacaatggttgtttgttgctaatttgatttgtttcattgtgttgtgggcccttatgccaacatatgcagtgcacaaatcggatatgcagttgcctttatatgccagttttaaagttatagataatggtgtgctaagggatgtgtctgttactgacgcatgcttcgcaaacaaatttaatcaatttgatcaatggtatgagtctacttttggtcttgcttattaccgcaactctaaggcttgtcctgttgtggttgctgtaatagatcaagacattggccataccttatttaatgttcctaccacagttttaagatatggatttcatgtgttgcattttataacccatgcatttgctactgatagcgtgcagtgttacacgccacatatgcaaatcccctatgataatttctatgctagtggttgcgtgttgtcatccctctgtactatgcttgcgcatgcagatggaaccccgcatccttattgttatacagggggtgttatgcataatgcctctctgtatagttctttggctcctcatgtccgttataacctggctagttcaaatggttatatacgttttcccgaagtggttagtgaaggcattgtgcgtgttgtgcgcactcgctctatgacctactgcagggttggtttatgtgaggaggccgaggagggtatctgctttaattttaatcgttcatgggtattgaacaacccgtattatagggccatgcctggaactttttgtggtaggaatgcttttgatttaatacatcaagttttaggaggattagtgcggcctattgatttctttgccttaacggcgagttcagtggctggtgctatccttgcaattattgtcgttttggctttctattatttaataaagcttaaacgtgcctttggtgactacactagtgttgtggttatcaatgtaattgtgtggtgtataaattttctgatgctttttgtgtttcaggtttatcccacattgtcttgtttatatgcttgtttttatttctacacaacgctttatttcccttcggagataagtgttgttatgcatttgcaatggcttgtcatgtatggtgctattatgcccttgtggttttgcattatttacgtggcagtcgttgtttcaaaccatgcattgtggttgttctcttactgccgcaaaattggtaccgaggttcgtagtgacggcacatttgaggaaatggcccttactacctttatgattactaaagaatcttattgtaagttgaaaaattctgtttctgatgttgcttttaacaggtacttgagtctttataacaagtatcgttattttagtggcaaaatggatactgccgcttatagagaggctgcctgttcacaactggcaaaggcaatggaaacatttaaccataataatggtaatgatgttctctatcagcctccaaccgcctctgttactacatcatttttacagtctggtatagtgaagatggtgtcgcccacctctaaagtggagccttgtattgttagtgttacttatggtaacatgacacttaatgggttgtggttggatgataaagtttattgcccaagacatgttatctgttcttcagctgacatgacagaccctgattatcctaatttgctttgtagagtgacatcaagtgatttttgtgttatgtctggtcgtatgagccttactgtaatgtcttatcaaatgcagggctgccaacttgttttgactgttacactgcaaaatcctaacacgcctaagtattccttcggtgttgttaagcctggtgagacatttactgtactggctgcatacaatggcagacctcaaggagccttccatgttacgcttcgtagtagccataccataaagggctcctttctatgtggatcctgcggttctgtaggatatgttttaactggcgatagtgtacgatttgtttatatgcatcagctagagttgagtactggttgtcataccggtactgactttagtgggaacttttatggtccctatagagatgcgcaagttgtacaattgcctgttcaggattatacgcagactgttaatgttgtagcttggctttatgctgctatttttaacagatgcaactggtttgtgcaaagtgatagttgttccctggaggagtttaatgtttgggctatgaccaatggttttagctcaatcaaagccgatcttgtcttggatgcgcttgcttctatgacaggcgttacagttgaacaggtgttggccgctattaagaggctgcattctggattccagggcaaacaaattttaggtagttgtgtgcttgaagatgagctgacaccaagtgatgtttatcaacaactagctggtgtcaagctacagtcaaagcgcacaagagttataaaaggtacatgttgctggatattggcttcaacgtttttgttctgtagcattatctcagcatttgtaaaatggactatgtttatgtatgttactacccatatgttgggagtgacattgtgtgcactttgttttgtaagctttgctatgttgttgatcaagcataagcatttgtatttaactatgtatattatgcctgtgttatgcacactgttttacaccaactatttggttgtgtacaaacagagttttagaggtctagcttatgcttggctttcacactttgtccctgctgtagattatacatatatggatgaagttttatatggtgttgtgttgctagtagctatggtgtttgttaccatgcgtagcataaaccacgacgtcttttctattatgttcttggttggtagacttgtcagcctggtatccatgtggtattttggagccaatttagaggaagaggtactattgttcctcacatccctatttggcacgtacacatggactactatgttgtcattggctaccgctaaggttattgctaaatggttggctgtgaatgtcttgtacttcacagacgtaccgcaaattaaattagttcttttgagctacttgtgtattggttatgtgtgttgttgttattggggaatcttgtcactccttaatagcatttttaggatgccattgggcgtctacaattataaaatctccgttcaggagttacgttatatgaatgctaatggcttgcgcccacctagaaatagttttgaggccctgatgcttaattttaagctgttgggaattggtggtgtgccagtcattgaagtatctcaaattcaatcaagattgacggatgttaaatgtgctaatgttgtgttgcttaattgcctccagcacttgcatattgcatctaattctaagttgtggcagtattgtagtactttgcacaatgaaatactggctacatctgatttgagcgtggccttcgataagttggctcaactcttagttgttttatttgctaatccagcagcagtggatagcaagtgccttgcaagtattgaagaagtgagcgatgattacgttcgcgacaatactgtcttgcaagccttacagagtgaatttgttaatatggctagcttcgttgagtatgaacttgctaagaagaatctagatgaggctaaggctagcggctctgccaatcaacagcagattaagcagctagagaaggcgtgtaatattgctaagtcagcatatgagcgcgacagagctgttgctcgtaagctggaacgtatggctgatttagctcttacaaacatgtataaagaagctagaattaatgataagaagagtaaggtagtgtctgcattgcaaaccatgctctttagtatggtgcgtaagctagataaccaagctcttaattctattttagataatgcagttaagggttgtgtacctttgaatgcaataccatcattgacttcgaacactctgactataatagtgccagataagcaggtttttgatcaggttgtggataatgtgtatgtcacctatgctgggaatgtatggcatatacagtttattcaagatgctgatggtgctgttaaacaattgaatgagatagatgttaattcaacctggcctctagtcattgctgcaaataggcataatgaagtgtctactgttgttttgcagaacaatgagttgatgcctcagaagttgagaactcaggttgtcaatagtggctcagatatgaattgtaatactcctacccagtgttactataatactactggcacgggtaagattgtgtatgctatacttagtgactgtgatggtctcaagtacactaagatagtaaaagaagatggaaattgtgttgttttggaattggatcctccctgtaagttttctgttcaggatgtgaagggccttaaaattaagtacctttactttgtgaaggggtgtaatacactggctagaggctgggttgtaggcaccttatcctcgacagtgagattgcaggcgggtacggcaactgagtatgcctccaactctgcaatactgtcgctgtgtgcgttttctgtagatcctaagaaaacgtacttggattatataaaacagggtggagttcccgttactaattgtgttaagatgttatgtgaccatgctggcactggtatggccattactattaagccggaggcaaccactaatcaggattcttatggtggtgcttccgtttgtatatattgccgctcgcgtgttgaacatccagatgttgatggattgtgcaaattacgcggcaagtttgtccaagtgcccttaggcataaaagatcctgtgtcatatgtgttgacgcatgatgtttgtcaggtttgtggcttttggcgagatggtagctgttcctgtgtaggcacaggctcccagtttcagtcaaaagacacgaactttttaaacggattcggggtacaagtgtaa

SEQ ID NO: 16185 - DNA, 2646 bp, unidentified
  source 1..2646: mol_type = other DNA
  misc_feature 1..2646: note = Synthetic
atgaaaagatcaatttctgtagacagttcttcacccaaaaacgtttttaatccagagacgcccaatggatttgatgacagtgtatatttaaacttcacctctatgcatagcattcaacctatcctctcacggattcgagaacttgccgcaattacgattccaaaagaacgtgttccgcggttgtgttggtttaaacagttactcgaactgcaagcgcctcctgaaatgcagaggaatgagctccccttctccgtttatttaattagcggaaatgccggctccggaaaaagcacgtgtatccaaacgcttaacgaagctatcgattgcattattaccggatccaccagggttgctgcccaaaatgttcatgctaagttatcaacggcttatgcgagtcgtccgataaacacaatctttcatgaatttggttttcgcggaaatcacattcaggctcagctgggccgttacgcatataactggactacgacccccccttctattgaggacctgcaaaaaagagatattgtatactactgggaagttttaattgatataacaaaacgagtgtttcaaatgggggacgacggtcgcggaggaacatcgacatttaaaaccctgtgggcaattgaacgtttgcttaataaacctacaggctcaatgtccggaaccgcgtttatcgcatgcggttcccttccggcttttacccggagcaacgttattgttattgatgaagcaggattgctagggcgtcatattctcacggccgttgtttactgttggtggcttttgaatgctatatatcaaagccctcagtacataaacggtcgaaaaccggtcatagtatgcgtcggttcgcccacccaaactgactcgttagaatctcattttcaacatgacatgcagcgttcacacgtaactcctagtgaaaatatactcacgtatataatctgcaatcaaactctgcgtcaatatactaacatctcacataactgggcaatctttattaataacaaacgatgtcaagaggacgattttggaaatcttttaaaaacgcttgagtacgggctacctattaccgaagcacatgcgcgtctggtcgatacatttgttgtacctgcatcctatattaacaatcctgctaatcttcccggatggacgcgtctgtattcgtcgcataaggaggtgagcgcgtatatgagtaagttacacgcgcatttaaaactatcgaaaaatgaccatttttctgtgtttgccttaccgacttatacattcatccggctaacggcatttgatgaataccgcaaattaacgggacaacccggactttctgttgaacattggatacgggcaaactccggtcgtttgcacaattattcccaaagccgagatcatgacatgggaacagttaaatacgaaacacattcaaatcgcgacttaattgtagcccgtacagacatcacttacgtgctaaatagtctcgtagttgtaaccacaagactacgtaagttagttattggattcagtggtacatttcaatcgtttgcaaaggttttacgtgacgactcctttgtgaaggctcgaggagagacatccatcgaatatgcttaccggtttctgtcaaacctaatctttggaggcttgattaacttttacaattttttgttaaataaaaacctacatcccgataaggtatcgttagcatacaaacggttagctgccttaaccctggagttattgtctggaacaaacaaagcccccttacacgaagcagcggttaatggggcgggtgccgggattgactgtgatggtgcagctacttctgccgataaagccttctgctttaccaaagcccccgagtccaaagtaacggcctccatacccgaagacccggatgatgtaatttttacggcacttaacgacgaggttattgacttggtatactgccagtacgaattttcctatcccaaatcatccaatgaggtccatgctcagtttctgttaatgaaagctatttacgatggtcgatatgccatattagcagagcttttcgaaagcagctttacaaccgccccctttagcgcgtatgtcgataatgttaatttcaacggaagcgagcttttgatcggcaatgtgcggggggggctgttatctttggcattacaaacagatacgtatacccttttggggtatacttttgcacccgtgccagtctttgtagaggaactgacccgaaaaaagctgtaccgcgaaactaccgaaatgttatatgctctacacgtacctcttatggtcttacaggatcaacatgggtttgtgtccatcgtaaacgctaacgtatgtgaatttaccgagtctatagaggatgcagaattggcaatggccaccacggtggactatggccttagttctaaactagccatgacaattgcacgctcacagggtctgagtttagagaaggtagctatctgttttacggcggataaactgcgcctaaatagtgtgtatgttgccatgtcgcgtacggtctcctctaggttcttaaaaatgaatctaaaccctctacgggaacgatatgaaaaatccgcagaaattagcgatcacattcttgccgctctacgtgatcccaacgtacacgttgtgtattaa

SEQ ID NO: 16186 - DNA, 27 bp, unidentified
  source 1..27: mol_type = other DNA
  misc_feature 1..27: note = Synthetic
atggatttgatgacagtgtatatttaa

SEQ ID NO: 16187 - DNA, 1500 bp, unidentified; identical to SEQ ID NO: 12709
  source 1..1500: mol_type = other DNA
  misc_feature 1..1500: note = Synthetic

SEQ ID NO: 16188 - DNA, 10176 bp, unidentified; identical to SEQ ID NO: 11266
  misc_feature 1..10176: note = Synthetic
  source 1..10176: mol_type = other DNA

SEQ ID NO: 16189 - DNA, 90 bp, unidentified; identical to SEQ ID NO: 6880
  source 1..90: mol_type = other DNA
  misc_feature 1..90: note = Synthetic

SEQ ID NO: 16190 - DNA, 27 bp, unidentified
  source 1..27: mol_type = other DNA
  misc_feature 1..27: note = Synthetic
atgaaaaggttactggaacagacttag

SEQ ID NO: 16191 - DNA, 87 bp, unidentified; identical to SEQ ID NO: 9756
  source 1..87: mol_type = other DNA
  misc_feature 1..87: note = Synthetic

SEQ ID NO: 16192 - DNA, 30 bp, unidentified; identical to SEQ ID NO: 9759
  misc_feature 1..30: note = Synthetic
  source 1..30: mol_type = other DNA

SEQ ID NO: 16193 - DNA, 510 bp, unidentified
  misc_feature 1..510: note = Synthetic
  source 1..510: mol_type = other DNA
acgggtgttccaatgagttggttggtaggcgccctgcagactttcgggtctttggctgatgtcgctggcactgtctccaacatagtgtaccagcagcgccaggccgcccagttggaaaaacagaatgaactaatggagacatggatgaacaaacaagaggcactgcagaagtcccagatggagttaactcgagacctctccatcaatggtccagccgcccgggtgcaatcggcacttgatgcaggttttgatgaagtgagtgcacggcgtattgctggttcaggtgagcgtgtgatctgggggaatttggatcgacccatcatgcatgctggcactatggacagcatacgccagactagacatttagactctctgagtcattcattggctacattcaagaatggaactccattcgggaaaccagcgcccccaacagcaaaatctggaaggccccaggccacaactgcacaaatcaccattggtcataaccctggtagcaccagtgtttaa

SEQ ID NO: 16194 - DNA, 48 bp, unidentified; identical to SEQ ID NO: 7686
  misc_feature 1..48: note = Synthetic
  source 1..48: mol_type = other DNA

SEQ ID NO: 16195 - DNA, 483 bp, unidentified
  source 1..483: mol_type = other DNA
  misc_feature 1..483: note = Synthetic
ttggggaagtcgacgatgcagtctgtgcatcacaactgcattcaccaggcgcaatatttgcaaggtttgagacagttgcaacagtctatttcgttcttggatcaatatttaatcgcagacgaggtttcgtggaacgttgttcccgtaatctgttttttcaggcagtggggactcaagttagatttttttaaaaagttttcggggaagaccaagcggttgtcattttcgtttatacgtgatttgttcgccaggtctcaggatggcgcagtgcaatctcttttatcaatacccaattacaccaattttagaagggcatgtcagaaacatactgatttgtacagaaaaagatgtcgaaaagctccaaagtcagtcctcactaagacttcgggagaaaatagatcaagggcatcgcgacaagttgctaagaatgcgcctaaaaaccgaattagacgcactgcaaaaaaagatgcaaaaagacagtga

SEQ ID NO: 16196 - DNA, 483 bp, unidentified
  misc_feature 1..483: note = Synthetic
  source 1..483: mol_type = other DNA
ttggggaagtcgacgatgcagtctgtgcatcacaactgcattcatcaggcgcaatatttgcaaggtttgagacagttgcatcagtctatttcgttcttggatcaatatttaattgcagacgaggttttgtggaacgttgttcccgtaatttgttttttcaggcagtggggactcaagttagatttttttaaaaagttttcggggaagaccaagcggttgtcattttcgtttatatgtgatttgttcgctaggtctcaggatggcgcagtgcaatctcttttatcaatacccaattacaccaattttagaagggcatgtcagaaacatactgatttgtacagaagaagatatcagaaggcttcaaagtcagtcctcactaagacttcgggagaaaatagatcaagggcatcgcgacaagttgctaagaatgcgcctaaaaaccgaattagacgcactgcaaagaaagatgcaaaaagacagtga

SEQ ID NO: 16197 - DNA, 204 bp, unidentified
  source 1..204: mol_type = other DNA
  misc_feature 1..204: note = Synthetic
ctggcctacgacagtctcatggtcatctttttctgcccacctaaccaatgcatccgtcacgccgtctgtctctacctggacagcatggccatctttctcacgttgttgctcatgctctcgggtccccgttggattagtctttcggacggcgcgcctttggacaacgggactttgacagccgccagtacgacggggaagtcctaa

SEQ ID NO: 16198 - DNA, 66 bp, unidentified; identical to SEQ ID NO: 9765
  source 1..66: mol_type = other DNA
  misc_feature 1..66: note = Synthetic

SEQ ID NO: 16199 - DNA, 99 bp, unidentified
  source 1..99: mol_type = other DNA
  misc_feature 1..99: note = Synthetic
atacatatgttccactctacatcaaacttctcgcagttttcttgttcccgcacacgtttacacgtccggattcaagtcgcaacgctgctgacaaaatga

SEQ ID NO: 16200 - DNA, 189 bp, unidentified
  misc_feature 1..189: note = Synthetic
  source 1..189: mol_type = other DNA
atggtctatacaatatatcccttaaaaattatggcatcaagacgtggcaaacaatgtatacaaatgtaccagaaggaacatacgacatatccgcatttccaaagaatgatttcgtatctttctgggttaaatttgaacaaggcgattataaagtggaagagtattgtacgggactatgcgtcgaagtaa

SEQ ID NO: 16201 - DNA, 189 bp, unidentified
  source 1..189: mol_type = other DNA
  misc_feature 1..189: note = Synthetic
atggtctatacaatatatcccttaaaaattatggcatcaagacgtggcaaacaatgtatacaaatgtaccagaaggaacatacgacatatccggatttccaaagaatgatttcgtatctttctgggttaaatttgaacaaggcgactataaagtggaagagtattgtacgggactatgtgtcgaagtaa

SEQ ID NO: 16202 - DNA, 129 bp, unidentified
  misc_feature 1..129: note = Synthetic
  source 1..129: mol_type = other DNA
gtggaaaggaccagcagaactcatttggaaaggagaaggagcggtggtaatcaaagaggggacagacttgaaggtagtaccaaggagaaaagcaaaaatcatcagagattatggaaaaacagtggatag

SEQ ID NO: 16203 - DNA, 315 bp, unidentified
  misc_feature 1..315: note = Synthetic
  source 1..315: mol_type = other DNA
ttggttaatatgctaacaacacaactagaactaaatactctacaaaaccaaatccaaaaaattttgaattttaaggtctactacagagaaggtagagatccagtgtggaaaggaccagcgcgactcatctggaaaggagaaggcgcggtggtaattaaagagggggaagacatcaaggtagtccccaggagaaaggctaagattatcaaagattatggagagagaaaaacaatggatagtgagggtagtatggagggtgtcagagaggcaaataagcagatggagggggatagtgacttacaagatcaggaataa

SEQ ID NO: 16204 - DNA, 573 bp, unidentified
  source 1..573: mol_type = other DNA
  misc_feature 1..573: note = Synthetic
ataggggatatgaccccagcagaaagactaatcaacatgattaccacagaacaagaaatacaattcctccaaagaaaaaattcaaattttaaaaatttccaggtctattacagagaaggcagagatcagctgtggaaaggacctggtgaactactgtggaagggagaaggagcagtcatagtcaaggtagggacagacataaaagtagtaccaagaaggaaggccaagattatcagggactatggaggaagacaggaactggatagtagtccccacctggagggtgccagggaggatggagaaatggcatgcccttgtcaagtacctgaaatacagaacaaaagacctagaggaggtgcgctatgttccccaccacaaggtgggatgggcatggtggacttgcagcagggtaatattcccactacaaggaaaaagtcatctagaaatacaggcatattggaacctaacaccagaaaaaggatggctctcctctcatgcagtaagattaacctggtatacagaaaagttctggacagatgttaccccagactgtgcagacatcctaatacatag

SEQ ID NO: 16205 - DNA, 165 bp, unidentified; identical to SEQ ID NO: 14053
  source 1..165: mol_type = other DNA
  misc_feature 1..165: note = Synthetic

SEQ ID NO: 16206 - DNA, 21 bp, unidentified
  source 1..21: mol_type = other DNA
  misc_feature 1..21: note = Synthetic
atgctgtcaagggtgtgctag

SEQ ID NO: 16207 - DNA, 153 bp, unidentified; identical to SEQ ID NO: 9775
  source 1..153: mol_type = other DNA
  misc_feature 1..153: note = Synthetic

SEQ ID NO: 16208 - DNA, 360 bp, unidentified
  misc_feature 1..360: note = Synthetic
  source 1..360: mol_type = other DNA
atggccaacagcctgtggcaccgcctccgaacgctcgtgagcaacagtcggcagaatgaacaaattcagcaacactcgtatcggcttcacttgcgcggttatggctccgcggactttaattctgacggttggactcctgtgtatgaggatcaggagtttattgtcttctcctgtcgagacgacggtaacaaccgccggcgtgacgtccgctcacggtccgctatgtccgctcgtgttccagggttgggcgtacgccgtgtaccaccaaggcgacatggtcctcatgacgctcgacgtgtactgctgccgccagacctccagcaacaccgtcgtcgcgttctcgcatcatcctgccgataa

SEQ ID NO: 16209 - DNA, 666 bp, unidentified
  misc_feature 1..666: note = Synthetic
  source 1..666: mol_type = other DNA
atgaacaaattcagcaacactcgtatcggcttcacttgcgcggttatggctccgcggactttaattctgacggttggactcctgtgtatgaggatcaggagtttattgtcttctcctgtcgagacgacggtaacaaccgccggcgtgacgtccgctcacggtccgctatgtccgctcgtgttccagggttgggcgtacgccgtgtaccaccaaggcgacatggtcctcatgacgctcgacgtgtactgctgccgccagacctccagcaacaccgtcgtcgcgttctcgcatcatcctgccgataacacgttgctgatcgaagtgggtaacaacacgcgtcgccacgtagacggaatctcctgtcaggaccattttcgcgcgcaacaccaggattgcccggcccagacggtgcacgtgcgcggcgtaaacgaaagcgcttttgggctcacccacctgcagtcctgttgcctgaacgagcattcacaactctcggagcgggtggcctaccatctgaagctgcgacccgccacgttcggtctggagacctgggccatgtacactgtgggcattctggccttggggtcgttctcctccttctattcccagatcgctaggagcctgggggttctgcccaacgatcatcactacgccttgaagaaggcttga

SEQ ID NO: 16210 - DNA, 33 bp, unidentified; identical to SEQ ID NO: 9778
  source 1..33: mol_type = other DNA
  misc_feature 1..33: note = Synthetic

SEQ ID NO: 16211 - DNA, 21 bp, unidentified
  source 1..21: mol_type = other DNA
  misc_feature 1..21: note = Synthetic
ctggcgatgtcgtttcgatag

SEQ ID NO: 16212 - DNA, 69 bp, unidentified; identical to SEQ ID NO: 9782
  source 1..69: mol_type = other DNA
  misc_feature 1..69: note = Synthetic

SEQ ID NO: 16213 - DNA, 87 bp, unidentified
  source 1..87: mol_type = other DNA
  misc_feature 1..87: note = Synthetic
ctgatcgaaactaatagtactgacactacagtactgaaatcatatgagctcatgcttcccaaacgtgctaaatccatacataactga

SEQ ID NO: 16214 - DNA, 87 bp, unidentified; identical to SEQ ID NO: 16213
  misc_feature 1..87: note = Synthetic
  source 1..87: mol_type = other DNA

SEQ ID NO: 16215 - DNA, 27 bp, unidentified
  misc_feature 1..27: note = Synthetic
  source 1..27: mol_type = other DNA
atgggaattccagaatctcaacattga

SEQ ID NO: 16216 - DNA, 6684 bp, unidentified; identical to SEQ ID NO: 14540
  source 1..6684: mol_type = other DNA
  misc_feature 1..6684: note = Synthetic

SEQ ID NO: 16217 - DNA, 51 bp, unidentified; identical to SEQ ID NO: 9786
  misc_feature 1..51: note = Synthetic
  source 1..51: mol_type = other DNA

SEQ ID NO: 16218 - DNA, 63 bp, unidentified
  source 1..63: mol_type = other DNA
  misc_feature 1..63: note = Synthetic
atgcagcctcagctagtaaacaagatttcagccaagacccatccaagttcacagagcctgtag

SEQ ID NO: 16219 - DNA, 63 bp, unidentified; identical to SEQ ID NO: 7914
  source 1..63: mol_type = other DNA
  misc_feature 1..63: note = Synthetic

SEQ ID NO: 16220 - DNA, 54 bp, unidentified; identical to SEQ ID NO: 9796
  misc_feature 1..54: note = Synthetic
  source 1..54: mol_type = other DNA

SEQ ID NO: 16221 - DNA, 84 bp, unidentified; identical to SEQ ID NO: 9797
  source 1..84: mol_type = other DNA
  misc_feature 1..84: note = Synthetic

SEQ ID NO: 16222 - DNA, 1611 bp, unidentified
  source 1..1611: mol_type = other DNA
  misc_feature 1..1611: note = Synthetic
gtgttttccaatttttccacatcccatataatacaggattataatctcgttcgaacatacgagaaagtggataaaacaatagttgattttttatctaggttgccaaatttattccatattttagaatatggggaaaatattctacatatttattctatggatgatgctaatacgaatattataattttttttctagatagagtattaaatattaataagaacgggtcatttatacacaatctcaggttatcatcatccattaatataaaagaatatgtatatcaattagttaataatgatcatccagataataggataagactaatgcttgaaaatggacgtagaacaagacattttttgtcctatatatcagatacagttaatatctatatatgtattttaataaatcatggattttatatagatgccgaagacagttacggttgtacattattacatagatgtatatatcactataagaaatcagaatcagaatcatacaatgaattaattaagatattgttaaataatggatcagatgtagataaaaaagatacgtacggaaacacaccttttatcctattatgtaaacacgatatcaacaacgtggaattgtttgagatatgtttagagaatgctaatatagactctgtagactttaatagatatacacctcttcattatgtctcatgtcgtaataaatatgattttgtaaagttattaatttctaaaggagcaaatgttaatgcgcgtaatagattcggaactactccattttattgtggaattatacacggtatctcgcttataaaactatatttggaatcagacacagagttagaaatagataatgaacatatagttcgtcatttaataatttttgatgctgttgaatctttagattatctattatccagaggagttattgatattaactatcgtactatatacaacgaaacatctatttacgacgctgtcagttataatgcgtataatacgttggtctatctattaaacagaaatggtgattttgagacgattactactagtggatgtacatgtatttcggaagcagtcgcaaacaacaacaaaataataatggaagtactattgtctaaacgaccatctttgaaaattatgatacagtctatgatagcaattactaaacataaacagcataatgcagatttattgaaaatgtgtataaaatatactgcgtgtatgaccgattatgatactcttatagatgtacagtcgctacagcaatataaatggtatattttaaaatgtttcgatgaaatagatatcatgaagagatgttatataaaaaataaaactgtattccaattagttttttgtatcaaagacattaatactttaatgagatacggtaaacatccttctttcgtgaaatgcactagtctcgacgtatacggaagtcgtgtacgtaatatcatagcatctattagatatcgtcagagattaattagtctattatccaagaagctggatcctggagataaatggtcgtgttttcctaacgaaataaaatataaaatattggaaaactttaacgataacgaactatccacatatctaaaaatcttataa

SEQ ID NO: 16223 - DNA, 99 bp, unidentified; identical to SEQ ID NO: 9798
  source 1..99: mol_type = other DNA
  misc_feature 1..99: note = Synthetic

SEQ ID NO: 16224 - DNA, 267 bp, unidentified
  misc_feature 1..267: note = Synthetic
  source 1..267: mol_type = other DNA
atggatctcgcgacttggagtgacttggccctgctgctctgtacgatgctggccacgggaatggggctagctgctctgctctgcgagttgtgcttgcggaggcgcgcgcgcatgccacggcgcggcgtgtccttctcgcgcgtcgttgtggtgcacaaaggctccccatccgggaacagcgaagacagcagcgacacagactgcgtcacgctcgcgctgctgccgcaagagcgtgccgaagaaaaagaggaagaactctccgagtga

SEQ ID NO: 16225 - DNA, 210 bp, unidentified
  misc_feature 1..210: note = Synthetic
  source 1..210: mol_type = other DNA
atgcgagagaatgaatcaaatttccaatgtctgttttacgcatggtcaaagagactgtggggaatgcttccctggaatgtcagaatctcaacccgtttctgtcgtcaaaaagaagacttatcagaaactgtgtccaattcatcatatcctgggaagggcacccgagattgcctgttcggcctgcgatttggccaatgtggacttggatga

SEQ ID NO: 16226 - DNA, 285 bp, unidentified
  source 1..285: mol_type = other DNA
  misc_feature 1..285: note = Synthetic
atggacgtgctccgcaccgtcaagaacaattactccagcgtggtgttcgccggcatcgcgctgctggtgctcgcctgcatctttgccttcgtggagtttagcaaggtcacgacgagcgactacacctggcgagcgctctgcattgtgtgcttcatcaccgggatggtctcgctgctgggcatcgtgctcttcgcgggatacgggcgctattgcgcggcgcccgcgaaaaacgtgactgagggcgctcgatttaactctagcgagatcgaacttaacggccaataa

SEQ ID NO: 16227 - DNA, 3729 bp, unidentified
  misc_feature 1..3729: note = Synthetic
  source 1..3729: mol_type = other DNA
attgtcttccgttcatccaccatgagccacgaggaactaaccgcgctagcgccggtggggcccgcggcttttctctacttcagcaggttgaacgcagaaacgcaggagattctggccactctctcgctatgcgaccgttcctcgagcgtggtgatcgctcctctgttggcggggctcacggtggaggcggatttcggcgtctctgtgcgtacgcctgtgctttgttacgacggcggggtgctcacgaaagtcacgtccttctgtccttttgcgctctactttcatcatacgcaaggcatcgtggcttttaccgaggatcacggagacgtgcatcggctgtgcgaggacgcccgccagaagtacgcgttggaggcctacacgcccgaggcggatcgcgtgcctaccgatctggcggcgttgtgcgcggcggtgggctgtcaggcgtccgagacgactgtgcacgtggtggtgggcaacggcttgaaggagtttctctttgccggtcagctgattccatgcgtggaggaggcgaccacggtgcgactgcacggcggcgaggcggtgcgcgtgccgttgtacccgcctacgctctttaattcgctgcagcttgacgccgaagccgacgaggtctcgctggatgcgcgcagcgcttttgtggaggcgcgagggctctacgtgccggccgtaagcgagacgcttttctactacgtgtacacgtcatggtgtcaatcgctgcgcttctcggagccgcgtgtgctgatcgaggcggcgttgcggcagtttgtgcacgacagtcagcagtcggtgaagctggcgccacataagcgctacttggggtacatgagccagcgactcagcagtctggaaaaggatcatctgatgctgagtgacgcggtggtttgcgagttggccttcagttttgcctcggtatttttcgattcggcctaccaacctgccgagtctatgctcttttccgagtggcctttagtgaccaacgcaaccgatcaccgcgatctgatccgcgcgctgaccgagctcaagttgcatctctcgacgcacgtggccgccttggtcttcagcgctaattcggtgctctaccagcacaggctggtgtatctccagtcgtcggcgcggcatcccagcgccggcggtacggccagtcaggagacgttgctcaaggctattcagttcaccaacgggttgtcggcggcctgcgaagacgtctacaacgacgcgcgcaaggtgctcaagtttcaaggcgcgccgctcaaggacgaacgctatgggccgcagcatttggcgttggtgtgtggcacgtgtccgcagctagtttcgggcttcgtctggtatctaaatcgtgtctcggtgtataacacgggcttgtcgggttcgtcgacgctcacgaatcacctggtgggctgcgccgcggggctgtgcgaggcctgtgggggtacttgttgccacacgtgttatcagacggccttcgtgcgggtgcgcacccgcttgcccgtggtgcccaagcagcccaagaaggagccctgcgtgatcaccgtgcagtcgcgttttctcaacgacgtggatattttgggcagcttcggtcggcgttacaacgtcgacgccaaggacgggggtttggacggcaaaggtgacgacggggttccgggcggcggtgctggcgggggtggtggacgggacgtgagcgggggcccgagcgacggtctgggcggcggtcgtggtggtgggggtggcggggattccgggggaatgatggggcgcggcggtcgcatgctgggcgctagcgtggaccgtacctatcggctcaatcgcatcttggattactgccgcaagatgcggctcatcgaccccgtgacgggcgaggatacctttagcgcgcacggcaaaagcgactttgtggccgtcttttcggcgctcaacaagtttgtggacgacgaggccctgggtttcgtttcggaggtgcgcctcaagagcagccgcgacgaggtggcgggcgccacgcaggccttcaacctggatctgaatccctacgccgtggccttccagccgctgctggcctacgcctatttcagatccgtcttttacgtgatccagaacgtggcgcttattaccgctacctcatacattgtggacaatccgttgaccaccaacttggtatccaaatggatgacgcagcattttcaatccattcacggcgcgttctccaccacgtcgtcgcgcaagggctttctcttcaccaagcagatcaagtcgtccaagaattcggatcacgaccgcctgctggactttaggctgtacgcgcagggcacgtacgccgtggtgcccatggagatcaagctctcgcggctatcggtacccacgttgatcatggtgcgggtgaaaaaccgacccatctaccgcgcgggcaagggcaacgcgggtagcgtgttttttcgccgcgatcacgttccgcgtcgtaatccggctaagggctgcttgggatttctgctgtatcgacatcacgagcgactctttcctgaatgtggtctcccctgcttacagttttggcagaaggtttgttccaacgcgttgcccaagaatgtgcccataggtgacatgggcgagttcaatgctttcgtcaaatttctggtggctgtgacggctgactatcaggagcacgatctgctggatgtggcgccagactgtgtgctgagttacgtggaaagccgtttccataacaaattcctctgctactacggcttcaaggactacatcggctcgctgcacgggttaacgacgcgcttaacgacgcagaaccacgcgcagtttcctcacgtgttaggtgctagtccgcgtttctcgtcgcccgccgaatttgcgttgcatgtcaagggcttgaagaccgcaggcgtgccggcgcccatggccgccactgtggcgcgtgaatcgttggtacggagcgtttttgagcatcgttccttggtgaccgtgcccgtgagcgtggaaaaatatgctggtatcaacaacagcaaggagatctatcagtttgggcagatcggctatttttcgggcaacggtgtggaacgcagccttaacgtgagctctatgagcggtcaagattatcgtttcatgcgccagcgctatctcttggctacgcgtctggccgacgtgctcatcaaacgctcgcgccgcgagaacgtgctttttgacgcggatcttataaaaaaccgcgtcatgctggcgctggacgccgagaacttggattgcgaccccgaagtgatggccgtgtacgagattttgagcgtgcgtgaggagatccccgcgtccgacgatgtgctcttcttcgtggatggctgcgaggcgctggccgcgtcgctgatggacaagtttgccgcgttgcaggagcagggcgtggaggacttttcgctggagaacttgcgacgcgtgctggacgccgacgcccagcgattaacggacgccgccgggggggaggtgcacgacctgtcggcgctcttcgcgcccagtggcgtcggcgcggcgtccggcgtcgggggtggcggtcttcttctcggcgagtccgtcgcgggcaactccatttgcttcggcgtgcccggcgagacgggaggtggctgctttctcgtgaacgccggcgaagacgaggctggcggcgtcggcgggagcagcgggggcggcgggggcagcgggttattgccggccaaacgcagccggttgtaa

SEQ ID NO: 16228 - DNA, 75 bp, unidentified; identical to SEQ ID NO: 9811
  source 1..75: mol_type = other DNA
  misc_feature 1..75: note = Synthetic

SEQ ID NO: 16229 - DNA, 21 bp, unidentified
  misc_feature 1..21: note = Synthetic
  source 1..21: mol_type = other DNA
acgagtagccgccaaaactga

SEQ ID NO: 16230 - DNA, 24 bp, unidentified
  misc_feature 1..24: note = Synthetic
  source 1..24: mol_type = other DNA
ctgaataactatcggacttcgtaa

SEQ ID NO: 16231 - DNA, 1035 bp, unidentified
  source 1..1035: mol_type = other DNA
  misc_feature 1..1035: note = Synthetic
atgccgctgttccggaagctcatggtctcccgcgccctcgtcaaggaatgtttgactctggacttccggcagggcgagcgtctccccacccgatgcttcctcccggtgcccgcggggacgacattccacagagtctgcgacacctcgccgctgacgaacgaagtctccaggcacgtgcaggagcccgtcatgggcaccggacgggtccagtactactacttcgagagcggccagggcatgatcggcgacaacgcgggcacgccgcgcatgctcgtgtgcacgcggtcggcgtacaacggcggcgacgtcgtcgtgcggtccacgcggagcagagcagacaaaaccgtggtcgcgccctgccagggcatggtgctgctgctgagccccttctgcgccttcgacatcacgccggtggagagcggctccgcgatattcgcggaggtcacggtcggcgcgcccagcatggaccacgtcgaggcggtcgccggcgacggcgacgcggccgtgcggatattcaactcgcaccacccgctctggccgcgacacggctcaaacgtctgcttcgcgctgcggttgctgcgagacgcgcgcacgggcgagcgcgtggtcgagcagatgttcatagacgggcgctggcacaccgtgctgaggacgtcctgcggcaacaaggtctgcgtgcccgccgacctcgtgggccagacgaacctcgaggaggtgcccttctgcgacgtgacgcccgatatcatgcgccgcgcgctggcgatcgacccgccgtacgaggccgtggcgcacccgcgccgctgcgtgtacggggccatggacgtccggtgcgcgaacgagtacctcgtgtactgcaccttcaagacggagccggcgcggcggagcacgtcctcgccgggcccggacggccccctgtcgcccgcgactccgtcggcctcgcagcccgcggccgcgcgcgccccgacgacgccgcaggaagtgacctcgccgaccacgaagctcgtggagacctgtctgcgcgacgccctcgactga

SEQ ID NO: 16232 - DNA, 45 bp, unidentified; identical to SEQ ID NO: 9819
  source 1..45: mol_type = other DNA
  misc_feature 1..45: note = Synthetic

SEQ ID NO: 16233 - DNA, 33 bp, unidentified; identical to SEQ ID NO: 9820
  source 1..33: mol_type = other DNA
  misc_feature 1..33: note = Synthetic

SEQ ID NO: 16234 - DNA, 651 bp, unidentified
  source 1..651: mol_type = other DNA
  misc_feature 1..651: note = Synthetic
ttggaagctattcttacaggagaagctttagcagctttggaagcagagatctccagtttaatgacaattgagggtatttctggcattgaggctttagctcaacttgggttcacagctgaacagttttcaaatttctcattagtggcttctttggttaaccaaggtttaacttatggcttcattctccaaactgttagtggtataggctctctaataactgtgggggtgaggttgtcacgcgagcaagtgtcacttgtaaagagggatgtttcgtgggtaggtagtaatgaggttttgaggcatgcacttatggcctttagcctagatcctctgcagtgggaaaatagcttgctgcattctgtggggcaagatatttttaattctttatctcctacctctaggctgcagatacaatcaaacctagtgaatctgatactaaatagccggtgggtctttcagacaactgcttctcagaatcagggccttttatcaggagaggctatattaattcctgaacatataggaggaactctgcagcagcaaactccagattggcttcttcctctggtactaggccttagtggatatatttctcctgaattacaagtaattgaagatggcaccaaaaagaaaagcatcatccacctgtaa

SEQ ID NO: 16235 - DNA, 24 bp, unidentified
  misc_feature 1..24: note = Synthetic
  source 1..24: mol_type = other DNA
atgatgaaatgtatgagatggtga

SEQ ID NO: 16236 - DNA, 93 bp, unidentified
  misc_feature 1..93: note = Synthetic
  source 1..93: mol_type = other DNA
gtgagaatgacggccacgtttctgtcaacaatgtctgtcatatgtatttcgcgttctttgatgttgatacatcgtctcatctgtttaagctag

SEQ ID NO: 16237 - DNA, 84 bp, unidentified; identical to SEQ ID NO: 9828
  misc_feature 1..84: note = Synthetic
  source 1..84: mol_type = other DNA

SEQ ID NO: 16238 - DNA, 36 bp, unidentified
  misc_feature 1..36: note = Synthetic
  source 1..36: mol_type = other DNA
ttgttcgaaaatacgagaaagtggataaaacaatag

SEQ ID NO: 16239 - DNA, 24 bp, unidentified
  source 1..24: mol_type = other DNA
  misc_feature 1..24: note = Synthetic
ataaagattatactccatctttaa

SEQ ID NO: 16240 - DNA, 609 bp, unidentified
  source 1..609: mol_type = other DNA
  misc_feature 1..609: note = Synthetic
atgagttatttaagatattacaatatgcttgacgacttctccgcgggtgctggagtgcttgataaagatttatttacagaggaacagcagcaatcgtttatgcctaaagatggaggtatgatgcaaaacgattatggaggaatgaatgattatttgggaatcttcaaaaataatgatgttagaacgttactcggtttgattttgttcgtcttggctctatatagccctcctctaatctctatattgatgatatttatctcatcttttctattgcctcttactagcttagttattacctattgcttagtaactcaaatgtatcgtggaggtaatggcaacactgtgggaatgtctattgtgtgtattgtagctgctgtaattattatggcaatcaatgtatttacgaattcacagatatttaatattatttcttacattattttgtttattctgttctttgcatatgtgatgaacatcgaaagacaggactataaaagaataaatataaccattcctgaacatcatacatgtaacaaaccttataatgcgggaaataaggtagatgttgatataccaacatttaacagtttaaatactgacgattattaa

SEQ ID NO: 16241 - DNA, 24 bp, unidentified
  misc_feature 1..24: note = Synthetic
  source 1..24: mol_type = other DNA
ataaagattatactccatctttaa

SEQ ID NO: 16242 - DNA, 24 bp, unidentified
  misc_feature 1..24: note = Synthetic
  source 1..24: mol_type = other DNA
ataaagattatactccatctttaa

SEQ ID NO: 16243 - DNA, 612 bp, unidentified
  misc_feature 1..612: note = Synthetic
  source 1..612: mol_type = other DNA
atgagttatttaagatattacaatatgcttgacgacttctctgcgggtgctggagtgcttgataaagatttatttacagaggaacagcagcaatcgtttatgcctaaagatggaggtatgatgcaaaacgattatggaggaatgaatgattatttgggaatcttcaaaaataatgatgttagaacgttactcggtttgattttgttcgtcttggctctatatagccctcctctaatctctatattgatgatatttatctcatcttttctattgcctcttactagcttagttattacctattgcttagtaactcaaatgtatcgtggaggtaatggcaacactgtgggaatgtctattgtgtgtattgtagctgctgtaattattatggcaatcaatgtatttacgaattcacagatatttaatattatttcttacattattttgtttattctgttctttgcatatgtgatgaacatcgaaagacaggactatagaagaagtataaatgtaaccattcctgaacagtatacctgcaacaaaccttatactgcgggaaataaggtagatgttgatataccaacatttaacagtttaaatactgacgattattaa

SEQ ID NO: 16244 - DNA, 612 bp, unidentified
  misc_feature 1..612: note = Synthetic
  source 1..612: mol_type = other DNA
atgagttatttaagatattacaatatgcttgacgacttctctgcgggtgctggagtgcttgataaagatttatttacagaggaacagcagcaatcgtttatgcctaaagatggaggtatgatgcaaaacgattatggaggaatgaatgattatttgggaatcttcaaaaataatgatgttagaacgttactcggtttgattttgttcgtcttggctctatatagccctcctctaatctctatattgatgatatttatctcatcttttctattgcctcttactagcttagttattacctattgcttagtaactcaaatgtatcgtggaggtaatggcaacactgtgggaatgtctattgtgtgtattgtagctgctgtaattattatggcaattaatgtatttacgaattcacagatatttaatattatttcttacattattttgtttattttgttctttgcatatgtgatgaacatcgaaagacaggactatagaagaagtataaatgtaaccattcctgaacagtatacctgcaacaaaccttatactgcgggaaataaggtagatgttgatataccaacatttaacagtttaaatactgacgattattaa

SEQ ID NO: 16245 - DNA, 24 bp, unidentified
  misc_feature 1..24: note = Synthetic
  source 1..24: mol_type = other DNA
ataaagattatactccatctttaa

SEQ ID NO: 16246 - DNA, 615 bp, unidentified
  misc_feature 1..615: note = Synthetic
  source 1..615: mol_type = other DNA
atgagttatttaagatattacaatatgcttgatgacttctctgcgggtgctggagtgcttgataaagatttatttacagaggaacagcagcaatcgtttatgcctaaagatgggggtatgatgcaaaacgattatggaggaataatgaatgattatttgggaatcttcaaaaataatgatgttagaacgttactcggtttgattttgttcgtcttggctctatatagccctcctctaatctctatattgatgatatttatctcatcttttctattgcctcttactagcttagttattacctattgcttagtaactcaaatgtatcgtggaggtaatggcaacactgtgggaatgtctattgtgtgtattgtagctgctgtaattattatggcaatcaatgtatttacgaattcacagatatttaatattatttcttacattattttgtttattctgttctttgcatttgtgatgaacatcgaaagacaggactataaaagaagtataaatgtacccattcctgaacagtatacctgcaacaaaccttatattgcgggaaataagatagatgttgatataccaacatttaacagtttaaatactgatgattattaa

SEQ ID NO: 16247 - DNA, 273 bp, unidentified
  source 1..273: mol_type = other DNA
  misc_feature 1..273: note = Synthetic
atggacatgatgcttatgattggaaattatttttccggagtgttaattgctggaatcattcttttgattctttcgtgtatctttgcctttattgactttagtaagtctaccagtcccactcgtacatggaaagtattgagtattatgtcgtttatacttggtattattatcacagtcggaatgctaatttattctatgtggggaaagcactgcgcaccccacagagttagtggagtcattcataccaatcatagcgatatttccgtaaactaa

SEQ ID NO: 16248 - DNA, 267 bp, unidentified
  misc_feature 1..267: note = Synthetic
  source 1..267: mol_type = other DNA
atgatgcttatgattggaaattatttttccggcgtgctaatcgctggaatcattcttttgattctttcgtgtatcttcgcctttattgactttagtaagtctaccagtcccactcgtacatggaaagtattgagtattatggcgtttatacttggtattattatcacagtcggaatgctaatttattctatgtggggaaagcactgcgcgccccacagagttagcggagtcattcataccaatcatagcgatatttccatgaactaa

SEQ ID NO: 16249 - DNA, 273 bp, unidentified
  source 1..273: mol_type = other DNA
  misc_feature 1..273: note = Synthetic
atggacatgatgcttatgattggaaattatttttccggcgtgctaatcgctggaatcattcttttgattctttcgtgtatctttgcctttattgactttagtaagtctaccagtcccactcgtacatggaaagtattgagtattatggcgtttatacttggtattattatcacagtcggaatgctaatttattctatgtggggaaagcactgcgcaccccacagagttagcggagtcattcataccaatcatagcgatatttccatgaactaa

SEQ ID NO: 16250 - DNA, 24 bp, unidentified
  source 1..24: mol_type = other DNA
  misc_feature 1..24: note = Synthetic
ataaaaatggacacgtggatatga

SEQ ID NO: 16251 - DNA, 213 bp, unidentified
  misc_feature 1..213: note = Synthetic
  source 1..213: mol_type = other DNA
atgatgattcttttgctcgactatatgacgccgtcaaacaccaataatttccttctcttcattccggacattaaattggctatagataataaagacattgaggtgttacaggctctgttcaaatacgacattaatatctattctgctaatctggaaaatgtactattggatgatgccgaaatagctaaaaatgattatagaaaagcatgttga

SEQ ID NO: 16252 - DNA, 48 bp, unidentified; identical to SEQ ID NO: 9847
  source 1..48: mol_type = other DNA
  misc_feature 1..48: note = Synthetic

SEQ ID NO: 16253 - DNA, 99 bp, unidentified; identical to SEQ ID NO: 9848
  misc_feature 1..99: note = Synthetic
  source 1..99: mol_type = other DNA

SEQ ID NO: 16254 - DNA, 207 bp, unidentified
  misc_feature 1..207: note = Synthetic
  source 1..207: mol_type = other DNA
ttgaatcacttagttgatatgaatgtgaaagacttttcaataactaatctgcagtcggtattcgagacggtgtcttcaaacgatgctccggtctatgacttttctgaaattctagcggaggaggacgatcaaggaaacggtgtattaaaatgtgatgaaacggaaaccgaaacagatgagccgatgactaagaaaaaccgattataa

SEQ ID NO: 16255 - DNA, 216 bp, unidentified
  source 1..216: mol_type = other DNA
  misc_feature 1..216: note = Synthetic
atgcttaaactgaatcacttagttgatatgaatgtgagagatttttcaatagctaatttgcagtcggtatttgaggcggtgtcttcaaacgatgctccggtctatgacttttctgaaattctagcggaggaggacgatcaagcaagcggtgtattaaaatgtgatgaaacggaaaccgaaacggatgagccgatgactaagaaaaaccgattataa

SEQ ID NO: 16256 - DNA, 129 bp, unidentified; identical to SEQ ID NO: 9852
  misc_feature 1..129: note = Synthetic
  source 1..129: mol_type = other DNA

SEQ ID NO: 16257 - DNA, 228 bp, unidentified
  misc_feature 1..228: note = Synthetic
  source 1..228: mol_type = other DNA
atgggtaaacaagatgacggaaaaggggataggaatcataagaacgaagacggaagtgcgttggcatcaaaacaggaaacgcaatataaaataaccaactacatggttcccactaaaaacgggactgcgggctctagcttatttaatgagaaagaagatagcgagagcgacgattccatgcattttgaatacagctccaatcctaagagacagagatgcgtcgtctga

SEQ ID NO: 16258 - DNA, 1560 bp, unidentified
  source 1..1560: mol_type = other DNA
  misc_feature 1..1560: note = Synthetic
atgaggcgtgcggtggtgtcttcctctcctcctccctcgtacgagagcgtgatggcgcaggcgaccctggaggttccgtttgtgcctccgcggtatatggctcctacggagggcagaaacagcattcgttactcggagctggctccgcagtacgacaccactcgcgtgtacttggtggacaacaagtcggcggacatcgcttccctgaactaccaaaacgaccacagcaacttcctgaccacggtggtgcagaacaacgatttcacccccgccgaggccagcacgcagacgataaattttgacgagcggtcgcggtggggcggtgatctgaagaccattctgcacactaacatgcccaatgtgaacgagtacatgttcaccagcaagtttaaggcgcgggtgatggtggctaggaagcatccagagggggtagttgaaacagatttgagtcaggataagcttgaatatgagtggtttgagtttaccctgcccgagggaaacttttccgagaccatgaccatagacctgatgaacaacgccatcttggaaaactacttgcaagtggggcggcaaaatggcgtgctggagagcgatatcggagtcaagtttgacagcagaaatttcaagctgggctgggacccggtgaccaagctggtgatgccaggggtctacacctacgaggccttccacccggacgtggtgctgctgccgggctgcggggtggacttcaccgagagccgcctgagcaacctcctgggcattcgcaagaagcaacctttccaagagggcttcagaatcatgtatgaggatctagaaggtggcaacatccccgccctccttgatgtgcccaagtacttggaaagcaagaagaaagttgaagacgaaactaaaaatgcagctgcggctacagccgatacaaccactaggggtgatacatttgcaactccagcgcaagagacagcagctgataagaaggtagaagtcttgcccattgaaaaggatgagagtggtagaagttacaacctgatccaggggacccacgacacgctgtaccgcagttggtacctgtcctatacctacggggaccccgagaagggggtgcagtcgtggacgctgctcaccaccccggacgtcacctgcggcgcggagcaagtctactggtcgctgccggacctcatgcaagacccagtcaccttccgctctacccagcaagtcagcaactaccccgtggtcggcgccgagctcatgcccttccgcgccaagagcttttacaacgacctcgccgtctactcccagctcatccgcagctacacctccctcacccacgtcttcaaccgcttccccgacaaccagatcctctgccgcccgcccgcgcccaccatcaccaccgtcagtgaaaacgtgcctgctctcacagatcacgggacgctaccgctgcgcagcagtatccgcggagtccagcgagtgaccgtcactgacgcccgtcgccgcacctgtccctacgtctacaaggccctgggcatagtcgcgccgcgcgtgctttccagtcgcaccttctaa

SEQ ID NO: 16259 - DNA, 69 bp, unidentified; identical to SEQ ID NO: 9857
  source 1..69: mol_type = other DNA
  misc_feature 1..69: note = Synthetic

SEQ ID NO: 16260 - DNA, 354 bp, unidentified
  source 1..354: mol_type = other DNA
  misc_feature 1..354: note = Synthetic
atgagggtgtgcttaagaatgccggtggagggcgctctgcgcgagctttttatcatggctggcttggatttacctcaggaactaatacgaatcattcaaggctggaaaaatgaaaattatctggggatggtgcaggagtgtaatatgatgattgaggaattagaaaacgctcccgctttcgctgtcctcttgtttctggatgtgcgcgtggaggctttgctggaagccaccgtggaacatctcgagaaccgtgtcacctttgacctggctgttattttccaccaacacagtgggggcgagaggtgccacctccgggacctgcattttgaagtgctccgagaccgtttggaataa

SEQ ID NO: 16261 - DNA, 3708 bp, unidentified
  source 1..3708: mol_type = other DNA
  misc_feature 1..3708: note = Synthetic
atgttttccggtggcggcggcccgctgtcccccggaggaaagtcggcggccagggcggcgtccgggttttttgcgcccgccggccctcgcggagccagccggggacccccgccttgtttgaggcaaaacttttacaacccctacctcgccccagtcgggacgcaacagaagccgaccgggccaacccagcgccatacgtactatagcgaatgcgatgaatttcgattcatcgccccgcgggtgctggacgaggatgcccccccggagaagcgcgccggggtgcacgacggtcacctcaagcgcgcccccaaggtgtactgcgggggggacgagcgcgacgtcctccgcgtcgggtcgggcggcttctggccgcggcgctcgcgcctgtggggcggcgtggaccacgccccggcggggttcaaccccaccgtcaccgtctttcacgtgtacgacatcctggagaacgtggagcacgcgtacggcatgcgcgcggcccagttccacgcgcggtttatggacgccatcacaccgacggggaccgtcatcacgctcctgggcctgactccggaaggccaccgggtggccgttcacgtttacggcacgcggcagtacttttacatgaacaaggaggaggtcgacaggcacctacaatgccgcgccccacgagatctctgcgagcgcatggccgcggccctgcgcgagtccccgggcgcgtcgttccgcggcatctccgcggaccacttcgaggcggaggtggtggagcgcaccgacgtgtactactacgagacgcgccccgctctgttttaccgcgtctacgtccgaagcgggcgcgtgctgtcgtacctgtgcgacaacttctgcccggccatcaagaagtacgagggtggggtcgacgccaccacccggttcatcctggacaaccccgggttcgtcaccttcggctggtaccgtctcaaaccgggccggaacaacacgctagcccagccgcgggccccgatggccttcgggacatccagcgacgtcgagtttaactgtacggcggacaacctggccatcgaggggggcatgagcgacctaccggcatacaagctcatgtgcttcgatatcgaatgcaaggcggggggggaggacgagctggcctttccggtggccgggcacccggaggacctggtcatccagatatcctgtctgctctacgacctgtccaccaccgccctggagcacgtcctcctgttttcgctcggttcctgcgacctccccgaatcccacctgaacgagctggcggccaggggcctgcccacgcccgtggttctggaattcgacagcgaattcgagatgctgttggccttcatgacccttgtgaaacagtacggccccgagttcgtgaccgggtacaacatcatcaacttcgactggcccttcttgctggccaagctgacggacatttacaaggtccccctggacgggtacggccgcatgaacggccggggcgtgtttcgcgtgtgggacataggccagagccacttccagaagcgcagcaagataaaggtgaacggcatggtgaacatcgacatgtacgggattataaccgacaagatcaagctctcgagctacaagctcaacgccgtggccgaagccgtcctgaaggacaagaagaaggacctgagctatcgcgacatccccgcctactacgccgccgggcccgcgcaacgcggggtgatcggcgagtactgcatacaggattccctgctggtgggccagctgttttttaagtttttgccccatctggagctctcggccgtcgcgcgcttggcgggtattaacatcacccgcaccatctacgacggccagcagatccgcgtctttacgtgcctgctgcgcctggccgaccagaagggctttattctgccggacacccaggggcgatttaggggcgccgggggggaggcgcccaagcgtccggccgcagcccgggaggacgaggagcggccagaggaggagggggaggacgaggacgaacgcgaggagggcgggggcgagcgggagccggagggcgcgcgggagaccgccggcaggcacgtggggtaccagggggccagggtccttgaccccacttccgggtttcacgtgaaccccgtggtggtgttcgactttgccagcctgtaccccagcatcatccaggcccacaacctgtgcttcagcacgctctccctgagggccgacgcagtggcgcacctggaggcgggcaaggactacctggagatcgaggtgggggggcgacggctgttcttcgtcaaggctcacgtgcgagagagcctcctcagcatcctcctgcgggactggctcgccatgcgaaagcagatccgctcgcggattccccagagcagccccgaggaggccgtgctcctggacaagcagcaggccgccatcaaggtcgtgtgtaactcggtgtacgggttcacgggagtgcagcacggactcctgccgtgcctgcacgttgccgcgacggtgacgaccatcggccgcgagatgctgctcgcgacccgcgagtacgtccacgcgcgctgggcggccttcgaacagctcctggccgatttcccggaggcggccgacatgcgcgcccccgggccctattccatgcgcatcatctacggggacacggactccatctttgtgctgtgccgcggcctcacggccgccgggctgacggccgtgggcgacaagatggcgagccacatctcgcgcgcgctgtttctgccccccatcaaactcgagtgcgaaaagacgttcaccaagctgctgctgatcgccaagaaaaagtacatcggcgtcatctacgggggtaagatgctcatcaagggcgtggatctggtgcgcaaaaacaactgcgcgtttatcaaccgcacctccagggccctggtcgacctgctgttttacgacgataccgtctccggagcggccgccgcgttagccgagcgccccgcggaggagtggctggcgcgacccctgcccgagggactgcaggcgttcggggccgtcctcgtagacgcccatcggcgcatcaccgacccggagagggacatccaggactttgtcctcaccgccgaactgagcagacacccgcgcgcgtacaccaacaagcgcctggcccacctgacggtgtattacaagctcatggcccgccgcgcgcaggtcccgtccatcaaggaccggatcccgtacgtgatcgtggcccagacccgcgaggtagaggagacggtcgcgcggctggccgccctccgcgagctagacgccgccgccccaggggacgagcccgccccccccgcggccctgccctccccggccaagcgcccccgggagacgccgtcgcctgccgaccccccgggaggcgcgtccaagccccgcaagctgctggtgtccgagctggccgaggatcccgcatacgccattgcccacggcgtcgccctgaacacggactattacttctcccacctgttgggggcggcgtgcgtgacattcaaggccctgtttgggaataacgccaagatcaccgagagtctgttaaaaaggtttattcccgaagtgtggcaccccccggacgacgtggccgcgcggctccggaccgcagggttcggggcggtgggtgccggcgctacggcggaggaaactcgtcgaatgttgcatagagcctttgatactctagcatga

SEQ ID NO: 16262 - DNA, 105 bp, unidentified; identical to SEQ ID NO: 9860
  source 1..105: mol_type = other DNA
  misc_feature 1..105: note = Synthetic

SEQ ID NO: 16263 - DNA, 33 bp, unidentified; identical to SEQ ID NO: 9861
  source 1..33: mol_type = other DNA
  misc_feature 1..33: note = Synthetic

SEQ ID NO: 16264 - DNA, 33 bp, unidentified; identical to SEQ ID NO: 9861
  source 1..33: mol_type = other DNA
  misc_feature 1..33: note = Synthetic

SEQ ID NO: 16265 - DNA, 207 bp, unidentified
  misc_feature 1..207: note = Synthetic
  source 1..207: mol_type = other DNA
ttggatcaatggagcgcccaaactcatctgtcgcagggttatactctggattacatggcaatggctctgtggagaaccttgctacggaggaagagggtcttaggttgcttgccggcgcagcgtccgcacggtttggatccagtgcaggaagaggaggaggaggaggagaacctgagggccggcctggacccttcaacggaattgtaa

SEQ ID NO: 16266 - DNA, 240 bp, unidentified
  source 1..240: mol_type = other DNA
  misc_feature 1..240: note = Synthetic
acgctcgtcatgggatcctgctgtggtagattctgtgacgctaagaataagaataagaaggaagatgtagaagagggaagagaaggatgttacaattataagaaccttaatgatctggatgaatccgaagcacgtgtagaatttggaccattatatatgataaatgaagaaaaatcagacataaatacattggatataaaaagaagatatagacacacgatagagtctgtatatttctaa

SEQ ID NO: 16267 - DNA, 591 bp, unidentified
  misc_feature 1..591: note = Synthetic
  source 1..591: mol_type = other DNA
ctgaagccgaaggagaggcaccacgaaaacaagaatcactctcagatgtcatcggactccttgacgtcgtcttatcctacaagcccacagaaattggagaagacagaagctggctccatggtatcatcgacaacccaaaagaaaacaagccatcatgcaaagccgacgataacaacaaagacagagcaatctcaacgtcgacccaagatcatagatcaagtgaggggagtggaatctctaggagaacaagtgagtcaaaaacagagacacatgctagaatccttgatcaacaaggtatacacagggcctctaggcgaggaactagtccaaaccctctacctgagaatatgggcaatgaaagaaacaccagaatcgacgaagattctccaaatgagagaagacatcagagatcagtacttacggatgaagacagaaagatggctgagaactctaataagagggaagaagaccaagttgagggatttccagaagaggtacgaagaagtacacccttatctgatgatggagagggtagaacaaataataatggaagaagcatggaaactagcagcacacatagtacaagaataa

SEQ ID NO: 16268 - DNA, 267 bp, unidentified
  misc_feature 1..267: note = Synthetic
  source 1..267: mol_type = other DNA
atgatgcttatgattggaaattatttttccggcgtgctaatcgctggaatcattcttttgattctttcgtgtatcttcgcctttattgactttagtaagtctaccagtcccactcgtacatggaaagtattgagtattatggcgtttatacttggtattattatcacagtcggaatgctaatttattctatgtggggaaagcactgtgcaccccacagagttagcggagtcattcacaccaatcatagcgatatttccatgaactaa

SEQ ID NO: 16269 - DNA, 2022 bp, unidentified
  misc_feature 1..2022: note = Synthetic
  source 1..2022: mol_type = other DNA
ttgcgcggagattcggccgccaagatccaggagcgctacgcggagctgcagaagcgcaagagccaccccacctcctgcatctccacggccttcaccaatgtggcggcgctgtgccgcaagcgctaccagatgatgcaccccgaactcgggctggcccactcgtgcaacgaggccttcctgccgctcatggccttctgcggccgccaccgcgactacaactcgcccgaggaaagccagcgcgagctgctgtttcacgagcgcctcaagagtgcgctcgatgaactgacgtttcgcccgtgctccgaggagcagcgcgcctcctaccagaagctggacgcgttgaccgagctctaccgcgatccgcagtttcagcagatcaacaacttcatgaccgactttaaaaagtggctcgacggcggcttcagtaccgccgtcgagggcgacgcaaaagccatccgactcgaaccgtttcaaaagaatttattgatacacgtcatcttttttatagccgtgaccaagatccccgtgctggccaatcgcgtgctgcagtacctcatccacgccttccagatcgacttcctctcgcagacctccatcgacatctttaagcagaaagccaccgtgttcctggtgccgcgacgtcacggcaagacttggttcatcatccccattatctcgtttctgcttaagcacatgatcggcatcagcatcggctacgtggcgcaccaaaagcacgtgtcgcagtttgtgctcaaagaggtcgagttccgctgccgccacaccttcgcgcgcgactacgtggtcgagaacaaggacaacgtgatcagcatcgaccaccgcggcgccaagagcacggcgctttttgccagttgctacaacaccaacagcatccgaggacaaaacttccatttgctgctggtggacgaggcgcacttcatcaagaaagaggccttcaacaccattctggggttcctggcccagaataccaccaagatcatcttcatatcgtccaccaacactaccagtgacgccacgtgtttcttgacgcgcctcaacaatgcgccctttgacatgctcaacgtggtctcttacgtgtgcgaagagcacctgcacagcttcacggagaagggcgacgccacggcgtgtccttgctaccgactgcacaagcccaccttcatcagcctcaactcgcaggtgcgcaagacggccaacatgtttatgccgggcgctttcatggacgagatcatcggcggtaccaataaaatctcgcagaacaccgtgctcatcacggaccagagccgcgaagagttcgatattttgcgttacagcacgctcaacaccaacgcctacgattatttcggcaagacgctttacgtgtatctggacccggccttcaccaccaaccgcaaggcctcgggcacgggcgtggcggccgtaggcgcctaccgacaccagtttctcatttacggcctagagcatttctttttgcgcgacctctccgagagttctgaggtagccatcgccgagtgcgcggcgcacatgatcatctcggtgctgagcctgcacccttacctggacgaactgcgtatcgccgtggagggcaacaccaaccaggcggcggccgtgcgcatcgcctgcctcatccgacagagcgtgcagagcagcacgctcatccgcgtgctcttctaccacacgcccgaccagaaccacatcgaacagcccttctacctcatgggccgcgacaaggcgctggccgtggaacagttcatctcgcgtttcaactcgggctacatcaaagcctcgcaagagctcgtctcctacaccatcaagctgagccacgaccccatcgagtatcttctggagcagattcagaacctgcaccgcgtcacgctggccgaaggcacgacggcacgctactcggccaagcgccagaatcgtatctcggacgatcttatcatcgccgtcatcatggccacctacctgtgtgacgatatacacgccatccgtttcagggtcagctag

SEQ ID NO: 16270 - DNA, 90 bp, unidentified; identical to SEQ ID NO: 9880
  misc_feature 1..90: note = Synthetic
  source 1..90: mol_type = other DNA

SEQ ID NO: 16271 - DNA, 816 bp, unidentified
  misc_feature 1..816: note = Synthetic
  source 1..816: mol_type = other DNA
atggctaagcgatatgcatcaagaaagagagtttatcgtcgaaaaacgcggaaaccttttagaagggttcgtcgatatcgtgttaaggcacgttcgacagctaaacgttattacaggcttaagagggctgctaggaattattcaaaggctaagaagattagaagggctaaaaggcaatacaagactatgtctggtaaaggtgttaagaataaattgtccaagctcacaatatcggaatttattcaattgccttattatgatgttgttaggccctctgctttactatatgcaggtattaagcctattggttattcttcacttactcaagatgattttaacaggtttgaagatcttactcagactgttattagaaaaatgggagcaatacttcctgagaagatgtttgcttctgctaatccttttattgttggaactaataaggattttcctccttgtttgtatggctataatcccattcttactccggttacttgtggtcaaaaaatgcaaatttatgctgcgctttattctaagttcaagtatgttgggattaaagtttcatggcatccaaggaataaagcagtttcatcatacattccagctgaattccaagtgaagtatgataaagatgtaatgtcacatgcttctcttactataccaccatcaacaaattatgtaccatcatcaatagcacagggaaacgcaatgtatactcctaaggataatttaaagcaaacaatagagttgactagatcagaagctgctgtatcaggtaattattacatgcacgtgtattttggtaaacaaattgaaagg

SEQ ID NO: 16272 - DNA, 816 bp, unidentified
  misc_feature 1..816: note = Synthetic
  source 1..816: mol_type = other DNA
atggctaagcgatatgcatcaagaaagagagtttatcgtcgaaaaacgcggaaaccttttagaagggttcgtcgatatcgtgttaaggcacgttcgacagctaaacgttattataggcttaagagggctgctaggaattattcgaaagtcaagaagattagaagggctaaaaggcaatataagacaatgtctggcaaaggtgttaagaataaattgtccaagctttcaatatcggaatttattcaattgccttattatgatcttattagacttgcttctatggtttgtagtaagatttctccaactggttatcctcttaatgacgaccagatggattcttttgttaatgaatatacaagcaggttcctttacaaaatgggtgctatactacctgagaagctttttactgcttctaatccttttattgttggatatgataaggctcttcctccttatttgtatggctataatcccatacttacgccggttacctgcggtcaaaaaatgcaaatatatgcgtcactttattccaaatttaaatatgttggtatcaaagtttcatggcatccaaggaataaagcagtttcatcatatgtaccttctgaattcactataaaacctactcaggatgtagtaacagaggctggtctagttgtacgaccaggtacagcaccagttccatctttgatagaaaaggcaaacgttatgattacacgttcagatcaattaaagcaaacggtagagatgaataaatcagtagctgttgtatcaggaaattattatatgcacgtttattttggaaaacagattgataca

SEQ ID NO: 16273 - DNA, 27 bp, unidentified
  misc_feature 1..27: note = Synthetic
  source 1..27: mol_type = other DNA
atgttttacatgccatatgttttgtaa

SEQ ID NO: 16274 - DNA, 216 bp, unidentified
  source 1..216: mol_type = other DNA
  misc_feature 1..216: note = Synthetic
attgcttttttggcaaccatattggataaatggagcgagaaatcccacctgagttgggattacatgctggattacatgtcaatgcagctgtggagggcatggctgaagaggagggtttgcatttactcgctggcgcggcctttgaccatgccgccgctgccgacgttgcaagaggagaaggaggaggagcggaaccctgcggtggtggagaagtaa

SEQ ID NO: 16275 - DNA, 243 bp, unidentified
  source 1..243: mol_type = other DNA
  misc_feature 1..243: note = Synthetic
ttgagttttataaaggataaatggagcgaagaaacccatctgagcggggggtacctgctggattttctggccatgcatctgtggagagcggtggtgagacacaagaatcgcctgctactgttgtcttccgtccgcccggcaataataccgacggaggagcaacagcaggaggaagccaggcggcggcggcggcaggagcagagcccatggaacccgagagccggcctggaccctcgggaatga

SEQ ID NO: 16276 - DNA, 264 bp, unidentified
  misc_feature 1..264: note = Synthetic
  source 1..264: mol_type = other DNA
gtggtttttctggttgacaaatggagccaggacacccaactgagcaggggctacatcctggacttcgcagccatgcacctgtggagggcctggatcaggcagcggggacagagaatcttgaattactggcttctacagccagcagctccgggtcttcttcgtctacacagacaaacatccatgttggaggaagaaatgaggcaggccatggacgagaacccgaggagcggcctggaccctccgtcggaagaggagctggattga

SEQ ID NO: 16277 - DNA, 61 bp, synthetic construct
  source 1..61: mol_type = other DNA
  misc_feature 1..61: note = Synthetic
gcatagacgacgcaggcggtcgcgcatgatcagcgcggggtcggtctcgtgtgttgacatg

SEQ ID NO: 16278 - DNA, 61 bp, synthetic construct; identical to SEQ ID NO: 16277
  misc_feature 1..61: note = Synthetic
  source 1..61: mol_type = other DNA

SEQ ID NO: 16279 - DNA, 15 bp, synthetic construct
  source 1..15: mol_type = other DNA
  misc_feature 1..15: note = Synthetic
tagcgatggcatccg

SEQ ID NO: 16280 - protein, 59 aa, synthetic construct
  REGION 1..59: note = Synthetic
MDPKISEMHPALRLVDPQIQLAVTRMENAVGRDQNNVGPKVYPIILRLGSPLSLNMARK

SEQ ID NO: 16281 - protein, 60 aa, synthetic construct
  REGION 1..60: note = Synthetic
MDPNQTNVVPPALHLVDPQIQLTITRMEDAMGQGQNSADPKVYPIILRLGSQLSLSMARR

SEQ ID NO: 16282 - protein, 38 aa, synthetic construct
  REGION 1..38: note = Synthetic
TLNSLEDKAFQLTPIAVQMTKLATTEELPDEFVVVTVK

SEQ ID NO: 16283 - protein, 38 aa, synthetic construct
  REGION 1..38: note = Synthetic
NLDSLEARAFQSTPIVVQMTKLATTEELPDEFVVVTAK

SEQ ID NO: 16284 - protein, 33 aa, synthetic construct
  REGION 1..33: note = Synthetic
IPAPHLLWTTKIARNRTRSFAKSKTIGLCWPFP

SEQ ID NO: 16285 - protein, 57 aa, synthetic construct
  REGION 1..57: note = Synthetic
VAGEAQRRRAKVEESVMDDLRDTLMAYGCIAIRAGDFNGLNDFLEQECGTRLHVAWP

SEQ ID NO: 16286 - protein, 22 aa, synthetic construct
  REGION 1..22: note = Synthetic
MQPLVLSAKKLSSLLICKYIPP

SEQ ID NO: 16287 - protein, 10 aa, synthetic construct
  REGION 1..10: note = Synthetic
VLSAKKLSSL

SEQ ID NO: 16288 - protein, 8 aa, synthetic construct
  REGION 1..8: note = Synthetic
VLSAKKLS

SEQ ID NO: 16289 - protein, 9 aa, synthetic construct
  REGION 1..9: note = Synthetic
LSAKKLSSL

SEQ ID NO: 16290 - protein, 8 aa, synthetic construct
  REGION 1..8: note = Synthetic
SAKKLSSL

SEQ ID NO: 16291 - protein, 33 aa, synthetic construct; identical to SEQ ID NO: 16284
  REGION 1..33: note = Synthetic

SEQ ID NO: 16292 - protein, 9 aa, synthetic construct
  REGION 1..9: note = Synthetic
FAKSKTIGL

SEQ ID NO: 16293 - protein, 40 aa, synthetic construct
  REGION 1..40: note = Synthetic
MTFPEIQGINVRTPALPDTEFEIPSRREDHGVAVARRRAP

SEQ ID NO: 16294 - protein, 38 aa, synthetic construct
  REGION 1..38: note = Synthetic
RRYRTGFPGPGHFLIYPAPRPQAIRRDFVARPAPGCCF

SEQ ID NO: 16295 - protein, 9 aa, synthetic construct
  REGION 1..9: note = Synthetic
YPAPRPQAI

SEQ ID NO: 16296 - protein, 30 aa, synthetic construct
  REGION 1..30: note = Synthetic
VAGEAQRRRAKVEESVMDDLRDTLMAYGCI

SEQ ID NO: 16297 - protein, 9 aa, synthetic construct
  REGION 1..9: note = Synthetic
VMDDLRDTL

SEQ ID NO: 16298 - protein, 12 aa, synthetic construct
  REGION 1..12: note = Synthetic
MEEILFFHVLLY

SEQ ID NO: 16299 - protein, 9 aa, synthetic construct
  REGION 1..9: note = Synthetic
ILFFHVLLY

SEQ ID NO: 16300 - protein, 33 aa, synthetic construct
  REGION 1..33: note = Synthetic
VIKIYQEEMKDLMTKIDSTTIYQSLNQDYSLIS

SEQ ID NO: 16301 - protein, 31 aa, synthetic construct
  REGION 1..31: note = Synthetic
HRNKIINAEKRMEILSILDCVPTRRNIAMTD

SEQ ID NO: 16302 - protein, 10 aa, synthetic construct
  REGION 1..10: note = Synthetic
HRHKIINAEK

SEQ ID NO: 16303 - protein, 15 aa, synthetic construct
  REGION 1..15: note = Synthetic
GGGGGGGGGGGGGGG

SEQ ID NO: 16304 - protein, 15 aa, synthetic construct
  REGION 1..15: note = Synthetic
GGGGSGGGGSGGGGS

SEQ ID NO: 16305 - protein, 5 aa, synthetic construct
  REGION 1..5: note = Synthetic
RGDYC

SEQ ID NO: 16306 - protein, 6 aa, synthetic construct
  REGION 1..6: note = Synthetic
KCCYSL

SEQ ID NO: 16307 - protein, 7 aa, synthetic construct
  REGION 1..7: note = Synthetic
YEVGHRC

SEQ ID NO: 16308 - protein, 8 aa, synthetic construct
  REGION 1..8: note = Synthetic
GPLGIAGQ

SEQ ID NO: 16309 - protein, 20 aa, synthetic construct
  REGION 1..20: note = Synthetic
METPAQLLFLLLLWLPDTTG

SEQ ID NO: 16310 - protein, 18 aa, synthetic construct
  REGION 1..18: note = Synthetic
MDWTWILFLVAAATRVHS

SEQ ID NO: 16311 - protein, 24 aa, synthetic construct
  REGION 1..24: note = Synthetic
MLGSNSGQRVVFTILLLLVAPAYS

SEQ ID NO: 16312 - protein, 17 aa, synthetic construct
  REGION 1..17: note = Synthetic
MKCLLYLAFLFIGVNCA

SEQ ID NO: 16313 - protein, 15 aa, synthetic construct
  REGION 1..15: note = Synthetic
MWLVSLAIVTACAGA

SEQ ID NO: 16314 - protein, 22 aa, synthetic construct
  REGION 1..22: note = Synthetic
GSGATNFSLLKQAGDVEENPGP

SEQ ID NO: 16315 - DNA, 66 bp, synthetic construct
  source 1..66: mol_type = other DNA
  misc_feature 1..66: note = Synthetic
ggaagcggagctactaacttcagcctgctgaagcaggctggagacgtggaggagaaccctggacct

SEQ ID NO: 16316 - protein, 10 aa, synthetic construct
  REGION 1..10: note = Synthetic
HRNKIINAEK
